(19) United States
(12) Patent Application Publication
(10) Pub. No.: US 2006/0210537 A1
(43) Pub. Date: Sep. 21, 2006

(54) Theileria parva DNA vaccines

(76) Inventors: Jean-Christophe Francis Audonnet, Lyon (FR); Sheena May Loosmore, Aurora (CA)

Correspondence Address: FROMMER LAWRENCE & HAUG, 745 FIFTH AVENUE- 10TH FL., NEW YORK, NY, 10151, US

(21) Appl. No.: 11/184,236

(22) Filed: Jul. 19, 2005

Related U.S. Application Data
(60) Provisional application No. 60/662,646, filed on Mar. 17, 2005.

(51) Int. Cl. A61K 48/00; C07H 21/04; C12N 15/86

(52) U.S. Cl. 424/93.2; 536/23.7; 435/456

(57) ABSTRACT

The present invention relates to recombinant anti-Theileria parva vaccines and the administration of such vaccines to animals, advantageously bovines. Advantageously, the anti-Theileria parva vaccine encompasses a recombinant avipox virus that includes a nucleotide sequence encoding a Theileria parva gene. The invention further relates to methods of vaccinating animals, advantageously bovines, by administration of anti-Theileria parva vaccines that may encompass a recombinant avipox virus that may contain a Theileria parva gene.

### INCORPORATION BY REFERENCE

[0001] This application claims priority form U.S. Provisional Patent Application Ser. No. 60/662,646 filed Mar. 17, 2005 and incorporated herein by reference in its entirety. All documents cited or referenced herein (“herein cited documents”), and all documents cited or referenced in herein cited documents, together with any manufacturer's instructions, descriptions, product specifications, and product sheets for any products mentioned herein or in any document incorporated by reference herein, are hereby incorporated herein by reference, and may be employed in the practice of the invention.

### SEQUENCE LISTING

[0002] The instant application contains a “lengthy” Sequence Listing which has been submitted via CD-R in lieu of a printed paper copy, and is hereby incorporated by reference in its entirety. Said CD-R, recorded on Jul. 15, 2005, are labeled CRF, “Copy 1” and “Copy 2”, respectively, and each contains only one identical 10.2 Mb file (57432681.APP).

### FIELD OF THE INVENTION

[0003] The present invention relates to vectors encompassing at least one polynucleotide of Theileria parva or at least one nucleic acid molecule encoding at least one Theileria parva antigen, immunogen or epitope, e.g., in vivo and in vitro expression vectors comprising and expressing at least one polynucleotide of the Theileria parva or in vivo and in vitro expression vectors comprising and expressing at least one Theileria parva antigen, immunogen or epitope. The present invention also relates to immunogenic compositions and vaccines against East Coast fever; for instance, such compositions or vaccines that contain one or more of the vectors and/or one or more of the expression products of the vectors. The invention further relates to methods for using the vectors, compositions and vaccines, including immunizing and vaccinating against Theileria parva, expressing expression products of the polynucleotide(s), using the expression products in assays or to generate antibodies useful in assays, as well as to methods for making the polynucleotide(s), vectors, compositions vaccines, assays, inter alia.

### BACKGROUND OF THE INVENTION

[0004] Theilerioses are a group of disease syndromes affecting cattle, sheep, goats and domestic buffalo caused by tick-borne haemo-protozoan parasites in the genus Theileria. The most economically important diseases include Mediterranean fever, East Coast Fever (ECF) and malignant theileriosis. Mediterranean fever caused by Theileria annulata occurs in North Africa, southern Europe, Near East, Middle East and many parts of Far East Asia with a population of 200 million cattle and buffalo at risk. ECF, caused by T. parva, affects 30 million cattle in eastern, central and southern Africa. Malignant theileriosis caused by T, lestoquardi affects sheep and goats in southeastern Europe, North Africa, the Near and Middle East and southern Russia and neighbouring States. These parasites belong to the same api-complexan group as Plasmodium falciparum, Toxoplasma gondii, Cytoxauzoon spp, Eimeria spp and Babesia spp, with a life-cycle having arthropod and mammalian components in which sexual and asexual stages develop, respectively. The pathogenic stages of Theileria parasites differ. T. parva causes a lympho-proliferative disorder in which schizont-infected lymphoblasts are responsible for the pathogenesis of the disease. Anaemic disease caused by T. lestoquardi and T. sergenii is due to piroplasm-infected erythrocytes while both the schizont and piroplasm of T. annulata are pathogenic resulting in lympho-proliferative and anaemic syndromes, respectively.

[0005] Currently, theilerioses are controlled largely by tick eradication using acaricides and through “infection and treatment” vaccination protocols of animals at risk. Such vaccination protocols are deemed effective in that an animal vaccinated in this manner will not develop ECF disease upon exposure to infectious T. parva. Due to cost and problems of tick resistance and environmental pollution, control of these diseases through acaricidal destruction of ticks is not sustainable.

[0006] Vaccination, while effective, presents shortcomings associated with the use of live vaccines. Owing to the ease of transmission of T. annulata, infected blood was originally used to immunise cattle by employing parasites of low virulence as the immunizing agent. However, such immunisations were accompanied by clinically-detectable infection episodes. With the advent of in vitro cultivation of T. annulata and the development of bulk culture techniques in the 1960s, significant progress was made in realising a more practical immunisation strategy. Currently, passage-attenuated cultures of T. annulata are routinely used in national vaccination programs in affected countries. By contrast, similar efforts to immunise cattle against T. parva have been unsuccessful, attributable to the failure of attenuated T. parva parasites to induce immunity. Much higher numbers of T. parva-infected cells are required to infect cattle reliably, since the schizonts of T. parva transfer at a low frequency and donor cells are rejected before successful transfer. T. lestoquardi has also been cultivated in vitro and studies have shown that attenuated parasites can be used to immunise animals with a degree of success.

[0007] Given the unsuccessful attempts to immunise cattle with attenuated T. parva subsequent efforts have focused on the use of virulent parasites with accompanying chemotherapy. The rationale of this infection and treatment method (ITM) is to allow the infection to establish and suppress development of frank clinical disease by administering theileriacidal drugs. Animals thus immunised are protected against the development of disease when exposed to the homologous parasite. This vaccination strategy has undergone successive refinements including the use of cryopreserved triturated tick stabilites containing sporozoites (the parasite stage infective for cattle lymphocytes) to standardise the immunisation-infection dose, as well as simultaneous drug administration. Further improvement of this immunisation approach has involved the identification and use of a combination of parasite stocks to broaden the immunising spectrum of the vaccine against several field T. parva parasite populations. The use of local parasite stocks to immunise in areas where they have been isolated is also practised. ITM immunisation against T. parva has been tested extensively under laboratory and field conditions and is now deployed in the affected region to control ECF.

[0008] ITM has a number of practical limitations that hinder its application as a sustainable control measure against ECF in those geographical areas most affected by the disease. Being live, it requires a cold refrigerator chain, which is impractical in Africa. ITM can also cause clinical disease if drug application is inadequate and it has the potential to introduce new parasite strains in areas under the vaccination campaign. The cost (US$ 10-20 per immunisation) of this current vaccine is well beyond the budget of poor farmers with cattle afflicted by ECF. Because of these concerns associated with the ITM vaccine protocol, there is still a need for a vaccine that will be sustainable and affordable.

[0009] A 67 kDa glycoprotein (p67) from the surface of the T. parva sporozoite has been isolated (U.S. Pat. No. 5,273,744) and used in a variety of immunization protocols, with little success reported so far in the development of practical levels of immune-mediated disease resistance. However, cattle recovering from a single infection with T. parva sporozoites resist infection upon homologous challenge. Such animals have weak antibody and T cell responses to p67. There is still a need, therefore, to identify T. parva antigens that can induce antigen-specific class I MHC-restricted CD8⁺ cytotoxic T lymphocytes (CTLs).

[0010] Accordingly, there is a need in the art for an efficacious and reliable Theileria parva vaccine where heterologous proteins are expressed with limited or no productive replication.

[0011] Citation or identification of any document in this application is not an admission that such document is available as prior art to the present invention.

### SUMMARY OF THE INVENTION

[0012] The present invention provides vectors containing at least one polynucleotide of the Theileria parva or at least one nucleic acid molecule encoding at least one Theileria parva antigen, immunogen or epitope, e.g., in vivo and in vitro expression vectors comprising and expressing at least one polynucleotide of the Theileria parva. The present invention further encompasses in vivo and in vitro expression vectors comprising and expressing at least one Theileria parva antigen, immunogen or epitope, as well as immunogenic compositions and vaccines against East Coast fever. Such compositions or vaccines may contain one or more of the vectors and/or one or more of the expression products of the vectors.

[0013] The present invention encompasses any immunogen or antigen of T. parva including, but is not limited to, any of the polypeptides Tp 1-8, fragments thereof, or combinations thereof. The combinations may be separate proteins or polyproteins. The compositions or vaccines may thus contain one or more vectors expressing more than one of the polypeptides, e.g., different proteins, immnogens or antigens. The compositions or vaccines may contain, or vectors thereof express, polypeptides from different strains or isolates of Theileria parva. Thus, the compositions or vaccines may contain, or the vectors thereof may express, but are not limited to, Tp1-8, fragments thereof, or combinations thereof, wherein the polypeptides Tp1-8 are from different strains or isolates.

[0014] Advantageously, in embodiments involving at least one epitope present in, or expressed by, a vector or vectors in compositions or vaccines of the invention, the epitope or epitopes may be from, but not limited to, any of Tp1-8 polypeptides of Theileria parva, fragments thereof, or combinations thereof, and the epitope or epitopes can be from different strains or isolates. In this regard, it is noted that one of skill in the art can locate or map epitopes in Theileria parva antigens or immunogens, such as the Tp1.

[0015] The invention further provides methods for using the vectors, compositions and vaccines, including immunizing and vaccinating against T. parva, expressing expression products of the polynucleotide(s), and methods for using the expression products in assays or to generate antibodies useful in assays, as well as to methods for making the, polynucleotide(s), vectors, compositions vaccines, assays, inter alia.

[0016] The present invention thus relates to means for preventing and/or combating diseases caused by the Theileria parva. The invention relates to such immunogenic and vaccine compositions suitable for use in different animal (target or host) species susceptible to disease caused by Theileria parva, in particular bovines, and the like.

[0017] The invention further provides immunization and vaccination methods involving the immunogenic and vaccine compositions of the invention, for the target or host species. And on this aspect of the invention, mention is made of compositions comprising one or more vectors that express one or more Theileria parva epitopes or antigens or immunogens can be delivered via food, e.g., cattle feed for consumption by wild or non-domesticated bovines, that includes or contains the one or more vectors. This route of administration may be advantageous when the one or more vectors is one or more poxviruses, e.g., an avipox virus such as an attenuated canarypox virus, for instance ALVAC, or an attenuated fowlpox virus, for instance TROVAC, or a vaccinia virus, such as an attenuated vaccinia virus, for instance NYVAC. Accordingly, the invention envisions oral or mucosal administration, as well as injectable compositions that contain one or more of the inventive vectors. From this disclosure and the knowledge in the art, the skilled artisan can formulate edible animal feed for a mammal that contains a suitable dose of one or more inventive vectors.

[0018] The invention further provides means and methods that make differential diagnosis possible, e.g., methods that make it possible to make, or allow for, a distinction between an animal infected by the East Coast fever pathogen and an animal administered a vaccine or immunogenic composition according to the invention.

[0019] In certain embodiments, the invention provides in vitro and/or in vivo expression vectors which may comprise a polynucleotide encoding any of, but not limited to, the proteins Tp1-8 of Theileria parva and the like, or an immunogenic fragment of such a protein. These vectors advantageously also may comprise the elements for the expression of the polynucleotide in a host cell.

[0020] In addition to the polynucleotide encoding any of Tp1-8 a fragment thereof, and the like, the expression vectors according to the invention may comprise one or more other polynucleotides encoding other proteins of the Theileria parva, advantageously structural proteins of the Theileria parva and said sequences are advantageously chosen from among those encoding membrane proteins, sporocyst antigens, transmembrane proteins and the like.

[0021] The vectors of the invention may advantageously comprise a polynucleotide forming a single encoding frame or coding region corresponding to, but not limited to, any of Tp1-8, or epitopes thereof; that is, expression of a polyprotein or epitopes thereof are considered advantageous. A vector comprising several separate polynucleotides encoding the different proteins (e.g. any of the Tp1-8 proteins) or epitopes thereof also falls within the scope of the present invention. The vector, especially for in vivo expression, may also comprise polynucleotides corresponding to more than one Theileria parva strain or isolate, for instance, two or more polynucleotides encoding Tp1-8, or epitope(s) thereof, of different strains.

[0022] Likewise, an immunogenic or vaccine composition may comprise one or more vectors for expression of polynucleotides corresponding to more than one Theileria parva strain or isolate. The vector, especially for in vivo expression, can additionally comprise one or more nucleotide sequences encoding immunogens of other pathogenic agents and/or cytokines. According to a preferred embodiment of the invention, the expression vectors of the present invention may comprise a polynucleotide encoding Tp1-8 or a fragment thereof, and preferably in a single reading frame.

[0023] One aspect of the present invention, therefore, is an avipox expression vector that may comprise a polynucleotide that encodes a Theileria parva immunogen. Advantageously, the T. parva poylpeptide may be an immunogen capable of inducing an immune response in an animal such as a bovine. In one embodiment of this aspect of the invention, the Theileria parva immunogen may be a polypeptide selected from the group consisting of Tp1, Tp2, Tp3, Tp4, Tp5, Tp6, Tp7 and Tp8. In various embodiments of the invention, the Theileria parva immunogen is a peptide having an amino acid sequence according to any of the group consisting of SEQ ID NOs: 7, 16, 26, 30, 32, 39, 44-49, 60-64 or a fragment thereof.

[0024] In other embodiments of the invention, the polynucleotide may comprise a nucleotide base sequence according to any of the group consisting of SEQ ID NOs: 1, 6, 12, 15, 17, 19, 24, 25, 29, 33, 36, 38, 43, 50-59, or the complement thereof.

[0025] In the various embodiments of the invention, the avipox expression vector is an attenuated avipox expression vector. In one embodiment, the avipox expression vector is a canarypox vector. In an advantageous embodiment the canarypox vector is ALVAC.

[0026] In yet other embodiments of this aspect of the invention, the avipox expression vector is a fowlpox vector. In one advantageous embodiment, the fowlpox vector is TROVAC.

[0027] Another aspect of the invention is a formulation for delivery and expression of a Theileria parva immunogen, wherein the formulation comprises an avipox expression vector comprising a polynucleotide that encodes a Theileria parva immunogen, and a pharmaceutically or veterinarily acceptable carrier, vehicle or excipient.

[0028] In this aspect of the invention, one embodiment further comprises an attenuated vaccinia virus comprising a polynucleotide comprises a nucleotide base sequence according to any of the group consisting of SEQ ID NOs: 1, 6, 12, 15, 17, 19, 24, 25, 29, 33, 36, 38, 43, 50-59, or the complement thereof. In another embodiment, the attenuated vaccinia virus is NYVAC.

[0029] Yet another aspect of the invention is a formulation for delivery and expression of a Theileria parva immunogen, wherein the formulation comprises an avipox expression vector comprising a nucleotide base sequence according to any of the group consisting of SEQ ID NOs: 1, 6, 12, 15, 17, 19, 24, 25, 29, 33, 36, 38, 43, 50-59, or the complement thereof, and wherein the avipox expression vector is an attenuated avipox expression vector, a canarypox vector, a fowlpox vector or an attenuated vaccinia virus. In one embodiment of this aspect, the fowlpox vector is TROVAC. In still another embodiment, the canarypox vector is ALVAC. In yet another embodiment, the attenuated vaccinia virus is MVA.

[0030] Another aspect of the invention is a method of delivering a Theileria parva antigen to an animal, comprising administering to the animal a formulation for delivery and expression of a Theileria parva immunogen, wherein the formulation comprises an avipox expression vector comprising a nucleotide base sequence according to any of the group consisting of SEQ ID NOs: 1, 6, 12, 15, 17, 19, 24, 25, 29, 33, 36, 38, 43, 50-59, or the complement thereof, and wherein the avipox expression vector is an attenuated avipox expression vector, a canarypox vector, a fowlpox vector or an attenuated vaccinia virus.

[0031] One embodiment of the invention is a method of eliciting an immune response against a strain of Theileria in an animal, comprising administering a formulation for delivery and expression of a Theileria parva immunogen, wherein the formulation comprises an avipox expression vector comprising a nucleotide base sequence according to any of the group consisting of SEQ ID NOs: 1, 6, 12, 15, 17, 19, 24, 25, 29, 33, 36, 38, 43, 50-59, or the complement thereof, and wherein the avipox expression vector is an attenuated avipox expression vector, a canarypox vector, a fowlpox vector or an attenuated vaccinia virus and in an effective amount for eliciting an immune response.

[0032] Still another embodiment of the invention is a method of inducing an immunological or protective response against a strain of Theileria in an animal, comprising administering to the animal an effective amount of a formulation for delivery and expression of a Theileria parva immunogen, wherein the formulation comprises an avipox expression vector comprising a polynucleotide that encodes a Theileria parva immunogen, and a pharmaceutically or veterinarily acceptable carrier, vehicle or excipient.

[0033] A method of eliciting an immune response against a strain of Theileria in an animal, comprising administering a composition comprising a cell, wherein the cell comprises an avipox expression vector comprising a polynucleotide that encodes a Theileria parva immunogen.

[0034] Another aspect of the invention is a kit for performing a method of inducing an immunological or protective response against a strain of Theileria in an animal comprising an avipox expression vector comprising a nucleotide base sequence that encodes a Theileria parva immunogen, or the complement thereof, and wherein the avipox expression vector is an attenuated avipox expression vector, a canarypox vector, a fowlpox vector or an attenuated vaccinia virus, and instructions for performing the method of delivery and expression of the vector in the animal.

[0035] Another embodiment of the invention is a kit for performing a method of inducing an immunological or protective response against a strain of Theileria in an animal comprising an avipox expression vector comprising a nucleotide base sequence according to any of the group consisting of SEQ ID NOs: 1, 6, 12, 15, 17, 19, 24, 25, 29, 33, 36, 38, 43, 50-59, or the complement thereof, and wherein the avipox expression vector is an attenuated avipox expression vector, a canarypox vector, a fowlpox vector or an attenuated vaccinia vector and instructions for performing the method of delivery and expression of the vector in an effective amount for eliciting an immune response in the animal.

[0036] It is noted that in this disclosure and particularly in the claims and/or paragraphs, terms such as “comprises”, “comprised”, “comprising” and the like can have the meaning attributed to it in U.S. Patent law; e.g., they can mean “includes”, “included”, “including”, and the like; and that terms such as “consisting essentially of” and “consists essentially of” have the meaning ascribed to them in U.S. Patent law, e.g., they allow for elements not explicitly recited, but exclude elements that are found in the prior art or that affect a basic or novel characteristic of the invention.

[0037] These and other embodiments are disclosed or are obvious from and encompassed by, the following Detailed Description.

### BRIEF DESCRIPTION OF THE DRAWINGS

[0038] The following detailed description, given by way of example, but not intended to limit the invention solely to the specific embodiments described, may best be understood in conjunction with the accompanying drawings, in which:

[0039] FIG. 1 illustrates the nucleotide sequence of Tp1 (SEQ ID NO 1) of plasmid pTarget Tp1, the amino acid sequence SEQ ID NO: 7 of the Tp1 polypeptide encoded therein. Nucleotide and amino acid substitutions compared to the nucleotide sequence SEQ ID NO: 51 (GenBank Accession No. CS008930) encoding the amino acid sequence SEQ ID NO 45 of Tp1 are boxed.

[0040] FIG. 2 illustrates schematically the construction of plasmid pSL-6174-1-1.

[0041] FIG. 3 illustrates the sequences of primers used in the construction of Tp-encoding clones, those regions of the oligonucleotides encoding amino acids and restriction sites within the primers useful for cloning (SEQ ID NOS: 2-5, 13-14, 20-21, 27-28, 31, 37 and 78-94).

[0042] FIG. 4 illustrates a structural map of the plasmid pSL-6174-1-1.

[0043] FIG. 5 illustrates the nucleotide sequence (SEQ ID NO 6) of the insert encoding Tp1 within pSL-6174-1-1.

[0044] FIGS. 6A-6M illustrates the amino acid sequences SEQ ID NOs: 7, 16, 26, 30, 32, 39, residues 263-459 of 44, 45-49 of the Theileria parva Tp-related polypeptides.

[0045] FIG. 7 illustrates schematically the construction of vector ALVAC Tp1 (vCP2112).

[0046] FIG. 8 illustrates the nucleotide sequence (SEQ ID NO: 12) of the insert encoding the polypeptide Tp1 of construct vCP2112.

[0047] FIG. 9 illustrates schematically the construction of the vector pSL-6104-5 having the Tp2 encoding polynucleotide inserted into vector PCXL-148-2.

[0048] FIG. 10 illustrates a map of vector pSL-5151-2.

[0049] FIG. 11 illustrates the nucleotide sequence SEQ ID NO: 15 of the insert within vector pSL-6151-2.

[0050] FIG. 12 schematically illustrates the in vivo recombination generating the ALVAC clone vCP2110 bearing the Tp2 encoding insert.

[0051] FIG. 13 illustrates the nucleotide sequence (SEQ ID NO: 95) and domains of the insert within plasmid pSL-6151-2 (Protein disclosed as SEQ ID NO: 16).

[0052] FIG. 14 illustrates nucleotide sequence SEQ ID NO: 65 of the CRL-H6p-Tp2-tag-CRR insert of the pSL-6151-2 vector.

[0053] FIG. 15 illustrates the nucleotide sequence SEQ ID NO: 17 of the C5R-H6p-Tp2-C5L insert of the vector vCP2110.

[0054] FIG. 16 illustrates the nucleotide sequence (SEQ ID NO: 19) of the Tp3-tag#5 insert of the plasmid pSG Tp3-tag#5 (Protein disclosed as SEQ ID NO: 26).

[0055] FIG. 17 schematically illustrates the construction of plasmid pCXL853.2.

[0056] FIG. 18 illustrates the nucleotide sequence SEQ ID NO: 24 of the insert of the plasmid construct pCXL853.2 (pC5H6-Tp3-tag).

[0057] FIG. 19 schematically illustrates the construction of the ALVAC vector vCP2143 with the H6p-Tp3-tag encoding insert.

[0058] FIG. 20 illustrates the nucleotide sequence SEQ ID NO: 25 of the H6p-Tp3-tag insert, polypeptide sequence translated therefrom (SEQ ID NO: 26), and flanking sequences inserted into the ALVAC vector vCP2143.

[0059] FIG. 21 schematically illustrates the construction of plasmid pSL-6555-2-1 having an H6p-Tp4-tag insert.

[0060] FIG. 22 illustrates the nucleotide sequence SEQ ID NO: 29 of the C5R H6p-Tp4-tag-C5L insert of the plasmid pSL-6555-2-1.

[0061] FIG. 23 schematically illustrates the construction of the plasmid pSL-6439-2 containing the insert encoding H6p-Tp5-tag.

[0062] FIG. 24 illustrates the nucleotide sequence SEQ ID NO: 33 of the inserted region of plasmid pSL-6439-2.

[0063] FIG. 25 schematically illustrates construction of the ALVAC vector vCP2138 bearing the insert Tp5-tag.

[0064] FIG. 26 illustrates the nucleotide sequence SEQ ID NO: 36 of the inserted region of the vector construct vCP2138.

[0065] FIG. 27 schematically illustrates construction of the plasmid vector pHM1103.1 containing the insert encoding H6p-Tp6-tag.

[0066] FIG. 28 illustrates the nucleotide sequence SEQ ID NO: 38 of the insert region encoding H6p-Tp6-tag, amino acid translations therefrom (SEQ ID NO: 39), and flanking sequences, of the plasmid vector pHM1103.1.

[0067] FIG. 29 illustrates the nucleotide sequence SEQ ID NO: 40 of the plasmid pHM1103.1.

[0068] FIG. 30 schematically illustrates construction of the ALVAC vector recombinant vCP2179 encoding the polypeptide Tp8-tag.

[0069] FIG. 31 illustrates the nucleotide sequence SEQ ID NO: 43 of the inserted region of vector vCP2179 encoding C5L-H6p-Tp8-tag-C5R and showing the amino acid sequence SEQ ID NO: 44 of the Tp8-tag polypeptide.

[0070] FIG. 32 illustrates the nucleotide sequence SEQ ID NO: 50 (GenBank Accession No. CS008930) encoding the amino acid sequence SEQ ID NO 45 of Tp1.

[0071] FIG. 33 illustrates the nucleotide sequence SEQ ID NO: 51 (GenBank Accession No. CS008931) encoding the amino acid sequence SEQ ID NO 46 of Tp4.

[0072] FIG. 34 illustrates the nucleotide sequence SEQ ID NO: 52 (GenBank Accession No. CS008932) encoding the amino acid sequence SEQ ID NO 47 of Tp5

[0073] FIG. 35 illustrates the nucleotide sequence SEQ ID NO: 53 (GenBank Accession No. CS008933) encoding the amino acid sequence SEQ ID NO 48 of Tp7.

[0074] FIG. 36 illustrates the nucleotide sequence SEQ ID NO: 54 (GenBank Accession No. CS008934) encoding the amino acid sequence SEQ ID NO: 49 of Tp8.

[0075] FIG. 37 illustrates the nucleotide sequences SEQ ID NOs: 55 (GenBank Accession No. CS00893), 56 (GenBank Accession No. CS008940), 57 (GenBank Accession No. CS008941), 58 (GenBank Accession No. CS008942), and 59 and their respective translation products SEQ ID NOs: 60-64 and derived from T. parva protein Tp1 (SEQ ID NO. 51).

[0076] FIG. 38 illustrates an immunoblot analysis of vCP2179, ALVAC-Tp8-tag expression.

[0077] FIG. 39 illustrates an immunoblot analysis of vFP2201 TROVAC-Tp2-tag expression.

[0078] FIG. 40 illustrates summed CD8⁺ T cell IFN-γ responses following MVA/CP immunization.

[0079] FIG. 41 illustrates summed CD8⁺ T cell IFN-γ responses following CP/MVA immunization.

[0080] FIG. 42 illustrates the individual kinetics of the IFNγ⁺CD8⁺ T cell response bovine BX223, ex-vivo stimulating antigen Tp8.

[0081] FIG. 43 illustrates the distribution of the BoLA type response after ex vivo individual antigen stimulation using PCA.

[0082] FIG. 44 illustrates the distribution of the BoLA type response.

### DETAILED DESCRIPTION

[0083] The practice of the present invention will employ, unless otherwise indicated, conventional techniques of molecular biology, microbiology, recombinant DNA technology, and immunology, which are within the skill of the art. Such techniques are explained fully in the literature. See, e.g., Sambrook, Fritsch & Maniatis, Molecular Cloning: A Laboratory Manual, Vols. I, II and III, Second Edition (1989); DNA Cloning, Vols. I and II (D. N. Glover ed. 1985); Oligonucleotide Synthesis (M. J. Gait ed. 1984); Nucleic Acid Hybridization (B. D. Hames & S. J. Higgins eds. 1984); Animal Cell Culture (R. K. Freshney ed. 1986); Immobilized Cells and Enzymes (IRL press, 1986); Perbal, B., A Practical Guide to Molecular Cloning (1984); the series, Methods In Enzymology (S. Colowick and N. Kaplan eds., Academic Press, Inc.); and Handbook of Experimental Immunology, Vols. I-IV (D. M. Weir and C. C. Blackwell eds., 1986, Blackwell Scientific Publications).

[0084] Before describing the present invention in detail, it is to be understood that this invention is not limited to particular DNA, polypeptide sequences or process parameters as such may, of course, vary. It is also to be understood that the terminology used herein is for the purpose of describing particular embodiments of the invention only, and is not intended to be limiting.

[0085] The following amino acid abbreviations are used throughout the text: Alanine: Ala (A); Arginine: Arg (R); Asparagine: Asn (N); Aspartic acid: Asp (D); Cysteine: Cys (C); Glutamine: Gln (Q); Glutamic acid: Glu (E); Glycine: Gly (G); Histidine: His (H); Isoleucine: Ile (I); Leucine: Leu (L); Lysine: Lys (K); Methionine: Met (M); Phenylalanine: Phe (F); Proline: Pro (P); Serine: Ser (S); Threonine: Thr (T); Tryptophan: Trp (W); Tyrosine: Tyr (Y); and Valine: Val (V).

[0086] Unless defined otherwise, all technical and scientific terms used herein have the same meaning as commonly understood by one of ordinary skill in the art to which the invention pertains. Although a number of methods and materials similar or equivalent to those described herein can be used in the practice of the present invention, the preferred materials and methods are described herein.

[0087] In describing the present invention, the following terms will be employed and are intended to be defined as indicated below.

[0088] The terms “protein”, “peptide”, “polypeptide” and “polypeptide fragment” as used herein refers to polymers of amino acid residues of any length. The polymer can be linear or branched, it may comprise modified amino acids or amino acid analogs, and it may be interrupted by chemical moieties other than amino acids. The terms also encompass an amino acid polymer that has been modified naturally or by intervention; for example disulfide bond formation, glycosylation, lipidation, acetylation, phosphorylation, or any other manipulation or modification, such as conjugation with a labeling or bioactive component.

[0089] The term “polynucleotide” as used herein refers to a polymeric form of nucleotides of any length, which contain deoxyribonucleotides, ribonucleotides, and analogs in any combination. Polynucleotides may have three-dimensional structure, and may perform any function, known or unknown. The term “polynucleotide” includes double-, single-stranded, and triple-helical molecules. Unless otherwise specified or required, any embodiment of the invention described herein that is a polynucleotide encompasses both the double stranded form and each of two complementary forms known or predicted to make up the double stranded form of either the DNA, RNA or hybrid molecule.

[0090] The following are non-limiting examples of polynucleotides: a gene or gene fragment, exons, introns, mRNA, tRNA, rRNA, ribozymes, cDNA, recombinant polynucleotides, branched polynucleotides, plasmids, vectors, isolated DNA of any sequence, isolated RNA of any sequence, nucleic acid probes and primers. A polynucleotide may comprise modified nucleotides, such as methylated nucleotides and nucleotide analogs, uracyl, other sugars and linking groups such as fluororibose and thiolate, and nucleotide branches. The sequence of nucleotides may be further modified after polymerization, such as by conjugation, with a labeling component. Other types of modifications included in this definition are caps, substitution of one or more of the naturally occurring nucleotides with an analog, and introduction of means for attaching the polynucleotide to proteins, metal ions, labeling components, other polynucleotides or solid support.

[0091] An “isolated” polynucleotide or polypeptide is one that is substantially free of the materials with which it is associated in its native environment. By substantially free, is meant at least 50%, advantageously at least 70%, more advantageously at least 80%, and even more advantageously at least 90% free of these materials.

[0092] An “isolated” nucleic acid molecule is a nucleic acid molecule separate and discrete from the whole organism with which the molecule is found in nature; or a nucleic acid molecule devoid, in whole or part, of sequences normally associated with it in nature; or a sequence, as it exists in nature, but having heterologous sequences (as defined below) in association therewith.

[0093] The term “polynucleotide encoding a protein” as used herein refers to a DNA fragment or isolated DNA molecule encoding a protein, or the complementary strand thereto; but, RNA is not excluded, as it is understood in the art that thymidine (T) in a DNA sequence is considered equal to uracil (U) in an RNA sequence. Thus, RNA sequences for use in the invention, e.g., for use in RNA vectors, can be derived from DNA sequences, by thymidine (T) in the DNA sequence being considered equal to uracil (U) in RNA sequences.

[0094] The term “protein” as used herein also includes proteins in neutral form or in the form of basic or acid addition salts depending on the mode of preparation. Such acid addition salts may involve free amino groups and basic salts may be formed with free carboxyls. In addition, the proteins may be modified by combination with other biological materials such as lipids and saccharides, or by side chain modification, such as acetylation of amino groups, phosphorylation of hydroxyl side chains, oxidation of sulfhydryl groups, glycosylation of amino acid residues, as well as other modifications of the encoded primary sequence.

[0095] The term “immunogenic protein or peptide” as used herein also refers includes peptides and polypeptides that are immunologically active in the sense that once administered to the host, it is able to evoke an immune response of the humoral and/or cellular type directed against the protein. Preferably the protein fragment is such that it has substantially the same immunological activity as the total protein. Thus, a protein fragment according to the invention comprises or consists essentially of or consists of at least one epitope or antigenic determinant. The term epitope relates to a protein site able to induce an immune reaction of the humoral type (B cells) and/or cellular type (T cells).

[0096] The term “immunogenic protein or peptide” further contemplates deletions, additions and substitutions to the sequence, so long as the polypeptide functions to produce an immunological response as defined herein. In this regard, particularly preferred substitutions will generally be conservative in nature, i.e., those substitutions that take place within a family of amino acids. For example, amino acids are generally divided into four families: (1) acidic—aspartate and glutamate; (2) basic—lysine, arginine, histidine; (3) non-polar—alanine, valine, leucine, isoleucine, proline, phenylalanine, methionine, tryptophan; and (4) uncharged polar—glycine, asparagine, glutamine, cystine, serine threonine, tyrosine. Phenylalanine, tryptophan, and tyrosine are sometimes classified as aromatic amino acids. It is reasonably predictable that an isolated replacement of leucine with isoleucine or valine, or vice versa; an aspartate with a glutamate or vice versa; a threonine with a serine or vice versa; or a similar conservative replacement of an amino acid with a structurally related amino acid, will not have a major effect on the biological activity. Proteins having substantially the same amino acid sequence as the reference molecule but possessing minor amino acid substitutions that do not substantially affect the immunogenicity of the protein are, therefore, within the definition of the reference polypeptide.

[0097] The term “epitope” refers to the site on an antigen or hapten to which specific B cells and/or T cells respond. The term is also used interchangeably with “antigenic determinant” or “antigenic determinant site”. Antibodies that recognize the same epitope can be identified in a simple immunoassay showing the ability of one antibody to block the binding of another antibody to a target antigen.

[0098] The compositions of the invention can include any pharmaceutically acceptable carrier known in the art.

[0099] An “immunological response” to a composition or vaccine is the development in the host of a cellular and/or antibody-mediated immune response to a composition or vaccine of interest. Usually, an “immunological response” includes but is not limited to one or more of the following effects: the production of antibodies, B cells, helper T cells, suppressor-T cells, and/or cytotoxic T cells and/or γδ T cells, directed specifically to an antigen or antigens included in the composition or vaccine of interest. Preferably, the host will display either a therapeutic or protective immunological response such that resistance to new infection will be enhanced and/or the clinical severity of the disease reduced. Such protection will be demonstrated by either a reduction or lack of symptoms normally displayed by an infected host, a quicker recovery time and/or a lowered viral titer in the infected host.

[0100] The terms “immunogenic” protein or polypeptide as used herein also refers to an amino acid sequence which elicits an immunological response as described above. An “immunogenic” protein or polypeptide, as used herein, includes the full-length sequence of the protein, analogs thereof, or immunogenic fragments thereof. By “immunogenic fragment” is meant a fragment of a protein which includes one or more epitopes and thus elicits the immunological response described above. Such fragments can be identified using any number of epitope mapping techniques, well known in the art. See, e.g., Epitope Mapping Protocols in Methods in Molecular Biology, Vol. 66 (Glenn E. Morris, Ed., 1996) Humana Press, Totowa, N.J. For example, linear epitopes may be determined by e.g., concurrently synthesizing large numbers of peptides on solid supports, the peptides corresponding to portions of the protein molecule, and reacting the peptides with antibodies while the peptides are still attached to the supports. Such techniques are known in the art and described in, e.g., U.S. Pat. No. 4,708,871; Geysen et al. (1984) Proc. Natl. Acad. Sci. USA 81:3998-4002; Geysen et al. (1986) Molec. Immunol. 23:709-715, all incorporated herein by reference in their entireties. Similarly, conformational epitopes are readily identified by determining spatial conformation of amino acids such as by, e.g., x-ray crystallography and 2-dimensional nuclear magnetic resonance. See, e.g., Epitope Mapping Protocols, supra. Methods especially applicable to the proteins of T. parva are fully described in the PCT Application Serial No. PCT/US2004/022605 incorporated herein by reference in its entirety.

[0101] Synthetic antigens are also included within the definition, for example, polyepitopes, flanking epitopes, and other recombinant or synthetically derived antigens. See, e.g., Bergmann et al. (1993) Eur. J. Immunol. 23:2777-2781; Bergmann et al. (1996) J. Immunol. 157:3242-3249; Suhrbier, A. (1997) Immunol. and Cell Biol. 75:402-408; Gardner et al. (1998) 12th World AIDS Conference, Geneva, Switzerland, Jun. 28-Jul. 3, 1998. Immunogenic fragments, for purposes of the present invention, will usually include at least about 3 amino acids, preferably at least about 5 amino acids, more preferably at least about 10-15 amino acids, and most preferably 25 or more amino acids, of the molecule. There is no critical upper limit to the length of the fragment, which could comprise nearly the full-length of the protein sequence, or even a fusion protein comprising at least one epitope of the protein.

[0102] Accordingly, a minimum structure of a polynucleotide expressing an epitope is that it comprises or consists essentially of or consists of nucleotides to encode an epitope or antigenic determinant of the Theileria parva protein or polyprotein. A polynucleotide encoding a fragment of the total protein or polyprotein, more advantageously, comprises or consists essentially of or consists of a minimum of 21 nucleotides, advantageously at least 42 nucleotides, and preferably at least 57, 87 or 150 consecutive or contiguous nucleotides of the sequence encoding the total protein or polyprotein. As mentioned earlier, epitope determination procedures, such as, generating overlapping peptide libraries (Hemmer B. et al., Immunology Today, 1998, 19 (4), 163-168), Pepscan (Geysen et al., (1984) Proc. Nat. Acad. Sci. USA, 81, 3998-4002; Geysen et al., (1985) Proc. Nat. Acad. Sci. USA, 82, 178-182; Van der Zee R. et al., (1989) Eur. J. Immunol., 19, 43-47; Geysen H. M., (1990) Southeast Asian J. Trop. Med. Public Health, 21, 523-533; Multipin.RTM. Peptide Synthesis Kits de Chiron) and algorithms (De Groot A. et al., (1999) Nature Biotechnology, 17, 533-561), and in PCT Application Serial No. PCT/US2004/022605 all of which are incorporated herein by reference in their entireties, can be used in the practice of the invention, without undue experimentation. Other documents cited and incorporated herein may also be consulted for methods for determining epitopes of an immunogen or antigen and thus nucleic acid molecules that encode such epitopes.

[0103] “Native” proteins or polypeptides refer to proteins or polypeptides isolated from the source in which the proteins naturally occur. “Recombinant” polypeptides refer to polypeptides produced by recombinant DNA techniques; i.e., produced from cells transformed by an exogenous DNA construct encoding the desired polypeptide. “Synthetic” polypeptides include those prepared by chemical synthesis as well as the synthetic antigens described above.

[0104] Elements for the expression of the polynucleotide or polynucleotides are advantageously present in an inventive vector. In minimum manner, this comprises, consists essentially of, or consists of an initiation codon (ATG), a stop codon and a promoter, and optionally also a polyadenylation sequence for certain vectors such as plasmid and certain viral vectors, e.g., viral vectors other than poxviruses. When the polynucleotide encodes a polyprotein fragment, such as, but no limited to, any of the T. parva proteins Tp1-8, or fragments thereof, advantageously, in the vector, an ATG is placed at 5′ of the reading frame and a stop codon is placed at 3′. Other elements for controlling expression may be present, such as enhancer sequences, stabilizing sequences and signal sequences permitting the secretion of the protein.

[0105] A DNA “coding sequence” or a “nucleotide sequence encoding” a particular protein, is a DNA sequence which is transcribed and translated into a polypeptide in vitro or in vivo when placed under the control of appropriate regulatory elements. The boundaries of the coding sequence are determined by a start codon at the 5′ (amino) terminus and a translation stop codon at the 3′ (carboxy) terminus. A coding sequence can include, but is not limited to, prokaryotic sequences, cDNA from eukaryotic mRNA, genomic DNA sequences from eukaryotic (e.g., mammalian) DNA, and even synthetic DNA sequences. A transcription termination sequence will usually be located 3′ to the coding sequence.

[0106] DNA “control elements” refers collectively to promoters, ribosome binding sites, polyadenylation signals, transcription termination sequences, upstream regulatory domains, enhancers, and the like, which collectively provide for the transcription and translation of a coding sequence in a host cell. Not all of these control sequences need always be present in a recombinant vector so long as the desired gene is capable of being transcribed and translated. A control element, such as a promoter, “directs the transcription” of a coding sequence in a cell when RNA polymerase will bind the promoter and transcribe the coding sequence into mRNA, which is then translated into the polypeptide encoded by the coding sequence.

[0107] “Operably linked” refers to an arrangement of elements wherein the components so described are configured so as to perform their usual function. Thus, control elements operably linked to a coding sequence are capable of effecting the expression of the coding sequence. The control elements need not be contiguous with the coding sequence, so long as they function to direct the expression thereof. Thus, for example, intervening untranslated yet transcribed sequences can be present between a promoter and the coding sequence and the promoter can still be considered “operably linked” to the coding sequence.

[0108] A “host cell” is a cell that has been transformed, or is capable of transformation, by an exogenous nucleic acid molecule.

[0109] A cell has been “transformed” by exogenous DNA when such exogenous DNA has been introduced inside the cell membrane. Exogenous DNA may or may not be integrated (covalently linked) into chromosomal DNA making up the genome of the cell. In prokaryotes and yeasts, for example, the exogenous DNA may be maintained on an episomal element, such as a plasmid. With respect to eukaryotic cells, a stably transformed cell is one in which the exogenous DNA has become integrated into the chromosome so that it is inherited by daughter cells through chromosome replication. This stability is demonstrated by the ability of the eukaryotic cell to establish cell lines or clones comprised of a population of daughter cells containing the exogenous DNA.

[0110] The term “vaccine composition” as used herein refers to any pharmaceutical composition containing an antigen, which composition can be used to prevent or treat a disease or condition in a subject.

[0111] By “subunit vaccine composition” is meant a composition containing at least one immunogenic polypeptide or a polynucleotide able to express at least one, but not all, antigen derived from or homologous to an antigen from a pathogen of interest. Such a composition is substantially free of intact pathogen cells or particles, or the lysate of such cells or particles. Thus, a “subunit vaccine composition” is prepared from at least partially purified (preferably substantially purified) immunogenic polypeptides from the pathogen, or recombinant analogs thereof. A subunit vaccine composition can comprise the subunit antigen or antigens of interest substantially free of other antigens or polypeptides from the pathogen.

[0112] One aspect of the present invention encompasses recombinant vaccines against Theileria parva. The present invention therefore provides preparations comprising viral vectors such as viral expression vectors for use in vaccines or immunogenic compositions. The preparations can comprise, consist essentially of, or consist of one or more vectors, e.g., expression vectors, such as in vivo expression vectors, comprising, consisting essentially or consisting of (and advantageously expressing) one or more of the Theileria parva polynucleotides encoding such proteins as any of Tp1-8 (according to SEQ ID NOs. 9-16, or combinations or polyproteins thereof, such as, for example, of Tp1-8 or at least an epitope thereof, especially as described in PCT Application Serial No. PCT/US2004/022605 incorporated herein by reference in its entirety. Advantageously, the vector may contain and express a polynucleotide that includes, consists essentially of, or consists of a coding region encoding any of the proteins Tp1-8 or fragments thereof of Theileria parva, in a pharmaceutically or veterinarily acceptable carrier, excipient or vehicle. Thus, according to an embodiment of the invention, the other vector or vectors in the preparation comprises, consists essentially of or consists of a polynucleotide that encodes, and under appropriate circumstances the vector expresses one or more other proteins or regions thereof, of the Theileria parva, e.g. any of, but not limited to, Tp1-8.

[0113] In an advantageous embodiment, the expression vector is a viral vector. In a particularly advantageous embodiment, the viral vector is an avipox vector. In a more advantageous embodiment, the avipox vector is a canarypox vector or a fowlpox vector. More advantageously, the avipox vector is an attenuated avipox vector. In a particularly advantageous embodiment, the attenuated avipox vector is an attenuated canarypox or an attenuated fowlpox vector. Advantageously, the attenuated canarypox vector is ALVAC and the attenuated fowlpox vector is TROVAC.

[0114] The invention further encompasses polynucleotides encoding functionally equivalent variants and derivatives of Theileria parva polypeptides and functionally equivalent fragments thereof which may enhance, decrease or not significantly affect properties of the polypeptides encoded thereby. These functionally equivalent variants, derivatives, and fragments display the ability to retain the immunogenic activity of a Theileria parva polypeptide. For instance, changes in a DNA sequence that do not change the encoded amino acid sequence, as well as those that result in conservative substitutions of amino acid residues, one or a few amino acid deletions or additions, and substitution of amino acid residues by amino acid analogs are those which will not significantly affect properties of the encoded polypeptide. Conservative amino acid substitutions are glycine/alanine; valine/isoleucine/leucine; asparagine/glutamine; aspartic acid/glutamic acid; serine/threonine/methionine; lysine/arginine; and phenylalanine/tyrosine/tryptophan.

[0115] Alternatively, homology can be determined by hybridization of polynucleotides under conditions that form stable duplexes between homologous regions, followed by digestion with single-stranded-specific nuclease(s), and size determination of the digested fragments. DNA sequences that are substantially homologous can be identified in a Southern hybridization experiment under, for example, stringent conditions, as defined for that particular system. Defining appropriate hybridization conditions is within the skill of the art. See, e.g., Sambrook et al., supra; DNA Cloning, supra; Nucleic Acid Hybridization, supra.

[0116] Two nucleic acid fragments are considered to be “selectively hybridizable” to a polynucleotide if they are capable of specifically hybridizing to a nucleic acid or a variant thereof (e.g., a probe that hybridizes to a Theileria parva nucleic acid but not to polynucleotides from other genes or members of the Theileria genus) or specifically priming a polymerase chain reaction: (i) under typical hybridization and wash conditions, as described, for example, in Sambrook et al., supra and Nucleic Acid Hybridization, supra, (ii) using reduced stringency wash conditions that allow at most about 25-30% basepair mismatches, for example: 2×SSC, 0.1% SDS, room temperature twice, 30 minutes each; then 2×SSC, 0.1% SDS, 37° C. once, 30 minutes; then 2×SSC room temperature twice, 10 minutes each, or (iii) selecting primers for use in typical polymerase chain reactions (PCR) under standard conditions (described for example, in Saiki, et al. (1988) Science 239:487-491), which result in specific amplification of sequences of a Theileria parva geneor its variants.

[0117] For the purposes of the present invention, sequence identity or homology is determined by comparing the sequences when aligned so as to maximize overlap and identity while minimizing sequence gaps. In particular, sequence identity may be determined using any of a number of mathematical algorithms. A nonlimiting example of a mathematical algorithm used for comparison of two sequences is the algorithm of Karlin & Altschul, Proc. Natl. Acad. Sci. USA 1990; 87: 2264-2268, modified as in Karlin & Altschul, Proc. Natl. Acad. Sci. USA 1993; 90: 5873-5877.

[0118] “Homology” refers to the percent identity between two polynucleotide or two polypeptide moieties. Two DNA, or two polypeptide sequences are “substantially homologous” to each other when the sequences exhibit at least about 80%-85%, preferably at least about 90%, and most preferably at least about 95%-98% sequence identity over a defined length of the molecules. As used herein, substantially homologous also refers to sequences showing complete identity to the specified DNA or polypeptide sequence.

[0119] An example of a mathematical algorithm used for comparison of sequences is the algorithm of Myers & Miller, CABIOS 1988; 4: 11-17. Such an algorithm is incorporated into the ALIGN program (version 2.0) which is part of the GCG sequence alignment software package. When utilizing the ALIGN program for comparing amino acid sequences, a PAM120 weight residue table, a gap length penalty of 12, and a gap penalty of 4 can be used. Yet another useful algorithm for identifying regions of local sequence similarity and alignment is the FASTA algorithm as described in Pearson & Lipman, (1988) Proc. Natl. Acad. Sci. USA, 85: 2444-2448.

[0120] Advantageous for use according to the present invention is the WU-BLAST (Washington University BLAST) version 2.0 software. WU-BLAST version 2.0 executable programs for several UNIX platforms can be downloaded from ftp ://blast. wustl. edu/blast/executables. This program is based on WU-BLAST version 1.4, which in turn is based on the public domain NCBI-BLAST version 1.4 (Altschul & Gish, 1996, Local alignment statistics, Doolittle ed., Methods in Enzymology 266: 460-480; Altschul et al., Journal of Molecular Biology 1990; 215: 403-410; Gish & States, 1993; Nature Genetics 3: 266-272; Karlin & Altschul, 1993; Proc. Natl. Acad. Sci. USA 90: 5873-5877; all of which are incorporated by reference herein).

[0121] In general, comparison of amino acid sequences is accomplished by aligning an amino acid sequence of a polypeptide of a known structure with the amino acid sequence of a the polypeptide of unknown structure. Amino acids in the sequences are then compared and groups of amino acids that are homologous are grouped together. This method detects conserved regions of the polypeptides and accounts for amino acid insertions and deletions. Homology between amino acid sequences can be determined by using commercially available algorithms (see also the description of homology above). In addition to those otherwise mentioned herein, mention is made too of the programs BLAST, gapped BLAST, BLASTN, BLASTP, and PSI-BLAST, provided by the National Center for Biotechnology Information. These programs are widely used in the art for this purpose and can align homologous regions of two amino acid sequences.

[0122] In all search programs in the suite the gapped alignment routines are integral to the database search itself. Gapping can be turned off if desired. The default penalty (Q) for a gap of length one is Q=9 for proteins and BLASTP, and Q=10 for BLASTN, but may be changed to any integer. The default per-residue penalty for extending a gap (R) is R=2 for proteins and BLASTP, and R=10 for BLASTN, but may be changed to any integer. Any combination of values for Q and R can be used in order to align sequences so as to maximize overlap and identity while minimizing sequence gaps. The default amino acid comparison matrix is BLOSUM62, but other amino acid comparison matrices such as PAM can be utilized.

[0123] Alternatively or additionally, the term “homology ” or “identity”, for instance, with respect to a nucleotide or amino acid sequence, can indicate a quantitative measure of identity between two sequences. The percent sequence identity can be calculated as (N_{ref}-N_{dif})*100/N_{ref}, wherein N_{dif} is the total number of non-identical residues in the two sequences when aligned and wherein N_{ref} is the number of residues in one of the sequences. Hence, the DNA sequence AGTCAGTC will have a sequence identity of 75% with the sequence AATCAATC (N_{ref}=8; N_{dif}=2).

[0124] Alternatively or additionally, “homology” or “identity” with respect to sequences can refer to the number of positions with identical nucleotides or amino acids divided by the number of nucleotides or amino acids in the shorter of the two sequences wherein alignment of the two sequences can be determined in accordance with the Wilbur and Lipman algorithm (Wilbur & Lipman, Proc Natl Acad Sci USA 1983; 80:726, incorporated herein by reference), for instance, using a window size of 20 nucleotides, a word length of 4 nucleotides, and a gap penalty of 4, and computer-assisted analysis and interpretation of the sequence data including alignment can be conveniently performed using commercially available programs (e.g., Intelligenetics™ Suite, Intelligenetics Inc. CA). When RNA sequences are said to be similar, or have a degree of sequence identity or homology with DNA sequences, thymidine (T) in the DNA sequence is considered equal to uracil (U) in the RNA sequence. Thus, RNA sequences are within the scope of the invention and can be derived from DNA sequences, by thymidine (T) in the DNA sequence being considered equal to uracil (U) in RNA sequences.

[0125] And, without undue experimentation, the skilled artisan can consult with many other programs or references for determining percent homology.

[0126] The term “capable of hybridizing under stringent conditions” as used herein refers to annealing a first nucleic acid to a second nucleic acid under stringent conditions as defined below. Stringent hybridization conditions typically permit the hybridization of nucleic acid molecules having at least 70% nucleic acid sequence identity with the nucleic acid molecule being used as a probe in the hybridization reaction. For example, the first nucleic acid may be a test sample or probe, and the second nucleic acid may be the sense or antisense strand of a nucleic acid encoding a Theileria parva polypeptide, or a fragment thereof. Hybridization of the first and second nucleic acids may be conducted under stringent conditions, e.g., high temperature and/or low salt content that tend to disfavor hybridization of dissimilar nucleotide sequences. Alternatively, hybridization of the first and second nucleic acid may be conducted under reduced stringency conditions, e.g. low temperature and/or high salt content that tend to favor hybridization of dissimilar nucleotide sequences. Low stringency hybridization conditions may be followed by high stringency conditions or intermediate medium stringency conditions to increase the selectivity of the binding of the first and second nucleic acids. The hybridization conditions may further include reagents such as, but not limited to, dimethyl sulfoxide (DMSO) or formamide to disfavor still further the hybridization of dissimilar nucleotide sequences. A suitable hybridization protocol may, for example, involve hybridization in 6×SSC (wherein 1×SSC comprises 0.015 M sodium citrate and 0.15 M sodium chloride), at 65° Celsius in an aqueous solution, followed by washing with 1×SSC at 65° C. Formulae to calculate appropriate hybridization and wash conditions to achieve hybridization permitting 30% or less mismatch between two nucleic acid molecules are disclosed, for example, in Meinkoth et al. (1984) Anal. Biochem. 138: 267-284; the content of which is herein incorporated by reference in its entirety. Protocols for hybridization techniques are well known to those of skill in the art and standard molecular biology manuals may be consulted to select a suitable hybridization protocol without undue experimentation. See, for example, Sambrook et al. (2001) Molecular Cloning: A Laboratory Manual, 3rd ed., Cold Spring Harbor Press, the contents of which are herein incorporated by reference in their entirety.

[0127] Typically, stringent conditions will be those in which the salt concentration is less than about 1.5 M sodium ion, typically about 0.01 to 1.0 M Na ion concentration (or other salts) from about pH 7.0 to about pH 8.3 and the temperature is at least about 30° Celsius for short probes (e.g., 10 to 50 nucleotides) and at least about 60° C. for long probes (e.g., greater than 50 nucleotides). Stringent conditions may also be achieved with the addition of destabilizing agents such as formamide. Exemplary low stringency conditions include hybridization with a buffer solution of 30 to 35% formamide, 1 M NaCl, 1% SDS (sodium dodecyl sulphate) at 37° Celsius, and a wash in 1-2×SSC at 50 to 55° Celsius. Exemplary moderate stringency conditions include hybridization in 40 to 45% formamide, 1 M NaCl, 1% SDS at 37° Celsius, and a wash in 0.5-1×SSC at 55 to 60° Celsius. Exemplary high stringency conditions include hybridization in 50% formamide, 1 M NaCl, 1% SDS at 37° Celsius, and a wash in 0.1×SSC at 60 to 65° Celsius.

[0128] The invention further encompasses a Theileria parva protein, advantageously any of, but not limited to, polypeptides Tp1-8 or fragments thereof of Theileria parva and contained in a vector molecule or an expression vector and operably linked to an enhancer and/or a promoter element if necessary. In one embodiment, the promoter is a cytomegalovirus (CMV) promoter. In another embodiment, the enhancers and/or promoters include various cell or tissue specific promoters, various viral promoters and enhancers and various Theileria parva DNA sequences isogenically specific for each animal species. Advantageously, poxvirus promoters, such as but not limited to vaccinia and entomopox virus promoters, are used for poxvirus expression vectors.

[0129] A “vector” refers to a recombinant DNA or RNA plasmid or virus that comprises a heterologous polynucleotide to be delivered to a target cell, either in vitro or in vivo. The heterologous polynucleotide may comprise a sequence of interest for purposes of therapy, and may optionally be in the form of an expression cassette. As used herein, a vector need not to be capable of replication in the ultimate target cell or subject. The term includes cloning vectors for translation of a polynucleotide encoding sequence. Also included are viral vectors.

[0130] The term “recombinant” means a cloned DNA or cDNA fragment or a synthetic DNA fragment which either does not occur in nature or is linked to another polynucleotide in an arrangement not found in nature.

[0131] A “heterologous” region of a DNA construct is an identifiable segment of DNA within or attached to another DNA molecule that is not found in association with the other molecule in nature. Thus, when the heterologous region encodes a protozoal gene or fragment thereof, the gene will usually be flanked by DNA that does not flank the protozoal gene in the genome of the source virus. Another example of the heterologous coding sequence is a construct where the coding sequence itself is not found in nature (e.g., synthetic sequences having codons different from the native gene). Allelic variation or naturally occurring mutational events do not give rise to a heterologous region of DNA, as used herein.

[0132] The heterologous gene can be placed under the control of a promoter, ribosome binding site (for bacterial expression) and, optionally, an enhancer or operator (collectively referred to herein as “control” elements), so that the DNA sequence encoding the desired protein is transcribed into RNA in the host cell transformed by a vector containing this expression construction. The coding sequence may or may not contain a signal peptide or leader sequence. If a signal sequence is included, it can either be the native, homologous sequence, or a heterologous sequence. Leader sequences can be removed by the host in post-translational processing. See, e.g., U.S. Pat. Nos. 4,431,739; 4,425,437; 4,338,397.

[0133] Control elements and other regulatory sequences may be ligated to the coding sequence prior to insertion into a vector, such as the cloning vectors described above. Alternatively, the coding sequence can be cloned directly into an expression vector that already contains the control sequences and an appropriate restriction site.

[0134] In some cases it may be necessary to modify the coding sequence so that it may be attached to the control sequences with the appropriate orientation; i.e., to maintain the proper reading frame. It may also be desirable to produce mutants or analogs of the desired Theileria protein. Mutants or analogs may be prepared by the deletion of a portion of the sequence encoding the protein, by insertion of a sequence, and/or by substitution of one or more nucleotides within the sequence. Techniques for modifying nucleotide sequences, such as site-directed mutagenesis, are described in, e.g., Sambrook et al., supra; DNA Cloning, supra; Nucleic Acid Hybridization, supra.

[0135] The expression vector is then used to transform an appropriate host cell. A number of mammalian cell lines are known in the art and include immortalized cell lines available from the American Type Culture Collection (ATCC), such as, but not limited to, Chinese hamster ovary (CHO) cells, HeLa cells, baby hamster kidney (BHK) cells, monkey kidney cells (COS), human hepatocellular carcinoma cells (e.g., Hep G2), Mandin-Darby bovine kidney (“MDBK”) cells, as well as others. Similarly, bacterial hosts such as E. coli, Bacillus subtilis, and Streptococcus spp., will find use with the present expression constructs. Yeast hosts useful in the present invention include inter alia, Saccharomyces cerevisiae, Candida albicans, Candida maltosa, Hansenula polymorpha, Kluyveromyces fragilis, Kluyveromyces lactis, Pichia guillerimondii, Pichia pastoris, Schizosaccharomyces pombe and Yarrowia lipolytica. Insert hosts useful in the present invention include, but are not limited to, Spodoptera frugiperda cells.

[0136] Methods for making and/or administering a vector or recombinants or plasmid for expression of gene products of genes of the invention either in vivo or in vitro can be any desired method, e.g., a method which is by or analogous to the methods disclosed in, or disclosed in documents cited in: U.S. Pat. Nos. 4,603,112; 4,769,330; 4,394,448; 4,722,848; 4,745,051; 4,769,331; 4,945,050; 5,494,807; 5,514,375; 5,744,140; 5,744,141; 5,756,103; 5,762,938; 5,766,599; 5,990,091; 5,174,993; 5,505,941; 5,338,683; 5,494,807; 5,591,639; 5,589,466; 5,677,178; 5,591,439; 5,552,143; 5,580,859; 6,130,066; 6,004,777; 6,130,066; 6,497,883; 6,464,984; 6,451,770; 6,391,314; 6,387,376; 6,376,473; 6,368,603; 6,348,196; 6,306,400; 6,228,846; 6,221,362; 6,217,883; 6,207,166; 6,207,165; 6,159,477; 6,153,199; 6,090,393; 6,074,649; 6,045,803; 6,033,670; 6,485,729; 6,103,526; 6,224,882; 6,312,682; 6,348,450 and 6; 312,683; U.S. patent application Ser. No. 920,197, filed Oct. 16, 1986; WO 90/01543; W091/11525; WO 94/16716; WO 96/39491; WO 98/33510; EP 265785; EP 0 370 573; Andreansky et al., Proc. Natl. Acad. Sci. USA 1996; 93:11313-11318; Ballay et al., EMBO J. 1993; 4:3861-65; Felgner et al., J. Biol. Chem. 1994; 269:2550-2561; Frolov et al., Proc. Natl. Acad. Sci. USA 1996; 93:11371-11377; Graham, Tibtech 1990; 8:85-87; Grunhaus et al., Sem. Virol. 1992; 3:237-52; Ju et al., Diabetologia 1998; 41:736-739; Kitson et al., J. Virol. 1991; 65:3068-3075; McClements et al., Proc. Natl. Acad. Sci. USA 1996; 93:11414-11420; Moss, Proc. Natl. Acad. Sci. USA 1996; 93:11341-11348; Paoletti, Proc. Natl. Acad. Sci. USA 1996; 93:11349-11353; Pennock et al., Mol. Cell. Biol. 1984; 4:399-406; Richardson (Ed), Methods in Molecular Biology 1995; 39, “Baculovirus Expression Protocols,” Humana Press Inc.; Smith et al. (1983) Mol. Cell. Biol. 1983; 3:2156-2165; Robertson et al., Proc. Natl. Acad. Sci. USA 1996; 93:11334-11340; Robinson et al., Sem. Immunol. 1997; 9:271; and Roizman, Proc. Natl. Acad. Sci. USA 1996; 93:11307-11312. Thus, the vector in the invention can be any suitable recombinant virus or virus vector, such as a poxvirus (e.g., vaccinia virus, avipox virus, canarypox virus, fowlpox virus, raccoonpox virus, swinepox virus, etc.), adenovirus (e.g., canine adenovirus), herpesvirus, baculovirus, retrovirus, etc. (as in documents incorporated herein by reference); or the vector can be a plasmid. The herein cited and incorporated herein by reference documents, in addition to providing examples of vectors useful in the practice of the invention, can also provide sources for non-Theileria parva proteins or fragments thereof, e.g., non-Theileria parva proteins or fragments thereof, cytokines, etc. to be expressed by vector or vectors in, or included in, the compositions of the invention.

[0137] The present invention also provides preparations comprising vectors, such as expression vectors, e.g., therapeutic compositions. The preparations can comprise, consist essentially of, or consist of one or more vectors, e.g., expression vectors, such as in vivo expression vectors, comprising, consisting essentially or consisting of (and advantageously expressing) one or more of Theileria parva polynucleotides and, advantageously, the vector contains and expresses a polynucleotide that includes, consists essentially of, or consists of a coding region encoding a Theileria parva protein in a pharmaceutically or veterinarily acceptable carrier, excipient or vehicle. Thus, according to an embodiment of the invention, the other vector or vectors in the preparation comprises, consists essentially of or consists of a polynucleotide that encodes, and under appropriate circumstances the vector expresses one or more other proteins of a Theileria parva, or a fragment thereof.

[0138] According to another embodiment, the vector or vectors in the preparation comprise, or consist essentially of, or consist of polynucleotide(s) encoding one or more proteins or fragment(s) thereof of a Theileria parva protein. The inventive preparation advantageously comprises, consists essentially of, or consists of, at least two vectors comprising, consisting essentially of, or consisting of, and advantageously also expressing, advantageously in vivo under appropriate conditions or suitable conditions or in a suitable host cell, polynucleotides from different Theileria parva isolates encoding the same proteins and/or for different proteins, but advantageously for the same proteins. As to preparations containing one or more vectors containing, consisting essentially of or consisting of polynucleotides encoding, and advantageously expressing, advantageously in vivo, a Theileria parva protein, or an epitope thereof, it is advantageous that the expression products be from two, three or more different Theileria parva isolates, advantageously strains. The invention is also directed at mixtures of vectors that contain, consist essentially of, or consist of coding for, and express, different Theileria parva proteins.

[0139] In an advantageous embodiment, the vector is a viral vector, advantageously an avipox vector containing a Theileria parva gene or a fragment thereof. In a particularly advantageous embodiment, the avipox vector is a canary pox vector, advantageously, an attenuated canarypox vector such as ALVAC. Attenuated canarypox viruses are described in U.S. Pat. No. 5,756,103 (ALVAC) and WO01/05934. In another particularly advantageous embodiment, the avipox vector is a fowlpox vector, advantageously an attenuated fowlpox vector such as TROVAC. Reference is also made to U.S. Pat. No. 5,766,599 that pertains to the attenuated fowlpox strain TROVAC. In this regard, reference is made to the canarypox available from the ATCC under access number VR-111. Numerous fowlpox virus vaccination strains are also available, e.g. the DIFTOSEC CT strain marketed by MERIAL and the NOBILIS VARIOLE vaccine marketed by INTERVET; and, reference is also made to U.S. Pat. No. 5,766,599 which pertains to the atenuated fowlpox strain TROVAC.

[0140] In one particular embodiment, the viral vector is a poxvirus, e.g. a vaccinia virus or an attenuated vaccinia virus, (for instance, MVA, a modified Ankara strain obtained after more than 570 passages of the Ankara vaccine strain on chicken embryo fibroblasts; see Stickl & Hochstein-Mintzel, Munch. Med. Wschr., 1971, 113, 1149-1153; Sutter et al., Proc. Natl. Acad. Sci. U.S.A., 1992, 89, 10847-10851; available as ATCC VR-1508; orNYVAC, see U.S. Pat. No. 5,494,807, for instance, Examples 1 to 6 and et seq of U.S. Pat. No. 5,494,807 which discuss the construction of NYVAC, as well as variations of NYVAC with additional ORFs deleted from the Copenhagen strain vaccinia virus genome, as well as the insertion of heterologous coding nucleic acid molecules into sites of this recombinant, and also, the use of matched promoters; see also WO96/40241), an avipox virus or an attenuated avipox virus (e.g., canarypox, fowlpox, dovepox, pigeonpox, quailpox, ALVAC or TROVAC; see, e.g., U.S. Pat. No. 5,505,941, 5,494,807), swinepox, raccoonpox, camelpox, or myxomatosis virus.

[0141] For information on the method to generate recombinants thereof and how to administer recombinants thereof, the skilled artisan can refer documents cited herein and to WO90/12882, e.g., as to vaccinia virus mention is made of U.S. Pat. Nos. 4,769,330, 4,722,848, 4,603,112, 5,110,587, 5,494,807, and 5,762,938 inter alia; as to fowlpox, mention is made of U.S. Pat. Nos. 5,174,993, 5,505,941 and U.S. Pat. No 5,766,599 inter alia; as to canarypox mentionis made of U.S. Pat. No. 5,756,103 inter alia; as to swinepox mention is made of U.S. Pat. No. 5,382,425 inter alia; and, as to raccoonpox, mention is made of WO00/03030 inter alia.

[0142] When the expression vector is a vaccinia virus, insertion site or sites for the polynucleotide or polynucleotides to be expressed are advantageously at the thymidine kinase (TK) gene or insertion site, the hemagglutinin (HA) gene or insertion site, the region encoding the inclusion body of the A type (ATI); see also documents cited herein, especially those pertaining to vaccinia virus. In the case of canarypox, advantageously the insertion site or sites are ORF(s) C3, C5 and/or C6; see also documents cited herein, especially those pertaining to canarypox virus. In the case of fowlpox, advantageously the insertion site or sites are ORFs F7 and/or F8; see also documents cited herein, especially those pertaining to fowlpox virus. The insertion site or sites for MVA virus are advantageously as in various publications, including Carroll M. W. et al., Vaccine, 1997, 15 (4), 387-394; Stittelaar K. J. et al., J. Virol., 2000, 74 (9), 4236-4243; Sutter G. et al., 1994, Vaccine, 12 (11), 1032-1040; and, in this regard it is also noted that the complete MVA genome is described in Antoine G., Virology, 1998, 244, 365-396, which enables the skilled artisan to use other insertion sites or other promoters.

[0143] Advantageously, the polynucleotide to be expressed is inserted under the control of a specific poxvirus promoter, e.g., the vaccinia promoter 7.5 kDa (Cochran et al., J. Virology, 1985, 54, 30-35), the vaccinia promoter I3L (Riviere et al., J. Virology, 1992, 66, 3424-3434), the vaccinia promoter HA (Shida, Virology, 1986, 150, 451-457), the cowpox promoter ATI (Funahashi et al., J. Gen. Virol., 1988, 69, 35-47), the vaccinia promoter H6 (Taylor J. et al., Vaccine, 1988, 6, 504-508; Guo P. et al. J. Virol., 1989, 63, 4189-4198; Perkus M. et al., J. Virol., 1989, 63, 3829-3836), inter alia.

[0144] Advantageously, for the vaccination of mammals the expression vector is a canarypox or a fowlpox. In this way, there can be expression of the heterologous proteins with limited or no productive replication.

[0145] The term plasmid covers any DNA transcription unit comprising a polynucleotide according to the invention and the elements necessary for its in vivo expression in a cell or cells of the desired host or target; and, in this regard, it is noted that a supercoiled or non-supercoiled, circular plasmid, as well as a linear form, are intended to be within the scope of the invention.

[0146] Plasmids according to the invention may comprise or contain or consist essentially of, in addition to the polynucleotide encoding a Theileria parva-derived polypeptide, variant, analog or fragment, operably linked to a promoter or under the control of a promoter or dependent upon a promoter. In general, it is advantageous to employ a strong promoter functional in eukaryotic cells. The preferred strong promoter is the immediate early cytomegalovirus promoter (CMV-IE) of human or murine origin, or optionally having another origin such as the rat or guinea bovine. The CMV-IE promoter can comprise the actual promoter part, which may or may not be associated with the enhancer part. Reference can be made to EP-A-260 148, EP-A-323 597, U.S. Pat. Nos. 5,168,062, 5,385,839, and 4,968,615, as well as to PCT Application No WO87/03905. The CMV-IE promoter is advantageously a human CMV-IE (Boshart M. et al., Cell, 1985, 41, 521-530) or murine CMV-IE.

[0147] In more general terms, the promoter has either a viral or a cellular origin. A strong viral promoter other than CMV-IE that may be usefully employed in the practice of the invention is the early/late promoter of the SV40 virus or the LTR promoter of the Rous sarcoma virus. A strong cellular promoter that may be usefully employed in the practice of the invention is the promoter of a gene of the cytoskeleton, such as e.g. the desmin promoter (Kwissa M. et al., Vaccine, 2000, 18, 2337-2344), or the actin promoter (Miyazaki J. et al., Gene, 1989, 79, 269-277).

[0148] Functional sub fragments of promoters, i.e., portions of promoters that maintain an adequate promoting activity, are included within the present invention, e.g. truncated CMV-IE promoters according to PCT Application No. WO98/00166 or U.S. Pat. No. 6,156,567 can be used in the practice of the invention. A promoter in the practice of the invention consequently may include derivatives and sub fragments of a full-length promoter that maintain an adequate promoting activity and hence function as a promoter, preferably promoting activity substantially similar to that of the actual or full-length promoter from which the derivative or sub fragment is derived, e.g., akin to the activity of the truncated CMV-IE promoters of U.S. Pat. No. 6,156,567 to the activity of full-length CMV-IE promoters. Thus, a CMV-IE promoter in the practice of the invention can comprise or consist essentially of or consist of the promoter portion of the full-length promoter and/or the enhancer portion of the full-length promoter, as well as derivatives and sub fragments.

[0149] Advantageously, the vectors comprise or consist essentially of other expression control elements. It is particularly advantageous to incorporate stabilizing sequence(s), e.g., intron sequence(s), preferably the first intron of the hCMV-IE (PCT Application No. WO89/01036), the intron II of the rabbit β-globin gene (van Ooyen et al., Science, 1979, 206, 337-344).

[0150] As to the polyadenylation signal (polyA) for the plasmids and viral vectors other than poxviruses, use can be made of the poly(A) signal of the bovine growth hormone (bGH) gene (see U.S. Pat. No. 5,122,458), or the poly(A) signal of the rabbit β-globin gene or the poly(A) signal of the SV40 virus and the like.

[0151] According to another embodiment of the invention, the expression vectors are expression vectors used for the in vitro expression of proteins in an appropriate cell system. The expressed proteins can be harvested in or from the culture supernatant after, or not after secretion (if there is no secretion a cell lysis typically occurs or is performed), optionally concentrated by concentration methods such as ultrafiltration and/or purified by purification means, such as affinity, ion exchange or gel filtration-type chromatography methods.

[0152] In the invention, preferably the polynucleotide also comprises a nucleotide sequence encoding a signal peptide, located upstream of the coding for the expressed protein to facilitate the secretion thereof; and accordingly, the invention comprehends the expression of a Theileria parva polypeptide, such as a Theileria parva antigen, immunogen, or fragment thereof, e.g., epitope, with a leader or signal sequence. The leader or signal sequence can be an endogenous sequence, e.g. the natural signal sequence of a Theileria parva polypeptide, which can be from the same Theileria parva strain or isolate or another strain or isolate. The leader or signal sequence can also be a heterologous sequence, and thus encoded by a nucleotide sequence that is heterologous to Theileria parva. For example, the leader or signal sequence can be endogenous to the vector, or a leader or signal sequence that is heterologous to both the vector and Theileria parva, such as a signal peptide of tissue plasminogen activator (tPA), e.g., human tPA, and thus, the vector or the polynucleotide therein can include a sequence encoding the leader or signal peptide, e.g., the leader or signal peptide of human tissue plasminogen activator (tPA) (Hartikka J. et al., Human Gene Therapy, 1996, 7, 1205-1217). The nucleotide sequence encoding the signal peptide is advantageously inserted in frame and upstream of the sequence encoding the Theileria parva polypeptide.

[0153] However, it is also noted that it can be advantageous that the vector not be a natural pathogen of the host; for instance, so that the vector can have expression of the exogenous, e.g., Theileria parva coding sequences, but with limited or no replication; for example, the use of an avipox vector in a mammalian host, as in U.S. Pat. No. 5,174,993. It is also noted that the invention comprehends vaccines, immunological and immunogenic compositions, with those terms being used in the sense attributed to them in the art; see, e.g., documents cited herein, such as U.S. Pat. No. 6,497,883.

[0154] It is understood to one of skill in the art that conditions for culturing a host cell varies according to the particular gene and that routine experimentation is necessary at times to determine the optimal conditions for culturing a Theileria parva protein, depending on the host cell. A “host cell” denotes a prokaryotic or eukaryotic cell that has been genetically altered, or is capable of being genetically altered by administration of an exogenous polynucleotide, such as a recombinant plasmid or vector. When referring to genetically altered cells, the term refers both to the originally altered cell and to the progeny thereof.

[0155] Polynucleotides comprising a desired sequence can be inserted into a suitable cloning or expression vector, and the vector in turn can be introduced into a suitable host cell for replication and amplification. Polynucleotides can be introduced into host cells by any means known in the art. The vectors containing the polynucleotides of interest can be introduced into the host cell by any of a number of appropriate means, including direct uptake, endocytosis, transfection, f-mating, electroporation, transfection employing calcium chloride, rubidium chloride, calcium phosphate, DEAE-dextran, or other substances; microprojectile bombardment; lipofection; and infection (where the vector is infectious, for instance, a retroviral vector). The choice of introducing vectors or polynucleotides will often depend on features of the host cell.

[0156] Protein production can take place by the transfection of mammalian cells by plasmids, by replication or expression without productive replication of viral vectors on mammal cells or avian cells, or by Baculovirus replication (see, e.g., U.S. Pat. No. 4,745,051; Vialard J. et al., J. Virol., 1990 64 (1), 37-50; Verne A., Virology, 1988, 167, 56-71), e.g. Autographa californica Nuclear Polyhedrosis Virus AcNPV, on insect cells (e.g. Sf9 Spodoptera frugiperda cells, ATCC CRL 1711; see also U.S. Pat. Nos. 6,228,846, 6,103,526). Mammalian cells that can be used are advantageously hamster cells (e.g. CHO or BHK-21) or-monkey cells (e.g. COS or VERO). Thus, the invention accordingly encompasses expression vectors incorporating a polynucleotide according to the invention, as well as the thus produced or expressed Theileria parva proteins or fragments thereof from in vitro expression, and the preparations containing the same.

[0157] Accordingly, the present invention also relates to Theileria parva protein-concentrated and/or purified preparations. When the polynucleotide encodes several proteins, they are cleaved, and the aforementioned preparations then contain cleaved proteins.

[0158] The present invention also relates to immunogenic compositions and vaccines against the Theileria parva comprising at least one in vivo expression vector according to the invention and a pharmaceutically or veterinarily acceptable excipient or carrier or vehicle, and optionally an adjuvant.

[0159] An immunogenic composition covers any composition that, once administered to the target species, induces an immune response against the Theileria parva. The term vaccine is understood to mean a composition able to induce an effective protection. The target species include mammals, e.g., bovines, porcines and humans.

[0160] In an advantageous embodiment, the invention provides for the administration of a therapeutically effective amount of a formulation for the delivery and expression of a Theileria parva protein, or an immunogenic fragment thereof in a target cell. Determination of the therapeutically effective amount is routine experimentation for one of ordinary skill in the art. In one embodiment, the formulation comprises an expression vector comprising a polynucleotide that expresses a Theileria parva protein, and a pharmaceutically or veterinarily acceptable carrier, vehicle or excipient. In an advantageous embodiment, the pharmaceutically or veterinarily acceptable carrier, vehicle or excipient facilitates transfection and/or improves preservation of the vector or protein.

[0161] The pharmaceutically or veterinarily acceptable carriers or vehicles or excipients are well known to the one skilled in the art. For example, a pharmaceutically or veterinarily acceptable carrier or vehicle or excipient can be a 0.9% NaCl (e.g., saline) solution or a phosphate buffer. Other pharmaceutically or veterinarily acceptable carrier or vehicle or excipients that can be used for methods of this invention include, but are not limited to, poly-(L-glutamate) or polyvinylpyrrolidone. The pharmaceutically or veterinarily acceptable carrier or vehicle or excipients may be any compound or combination of compounds facilitating the administration of the vector (or protein expressed from an inventive vector in vitro); advantageously, the carrier, vehicle or excipient may facilitate transfection and/or improve preservation of the vector (or protein). Doses and dose volumes are herein discussed in the general description and can also be determined by the skilled artisan from this disclosure read in conjunction with the knowledge in the art, without any undue experimentation.

[0162] Adjuvants that enhance the effectiveness of the vaccine may also be added to the formulation. Such adjuvants include, without limitation, adjuvants formed from aluminum salts (alum), such as aluminum hydroxide, aluminum phosphate, aluminum sulfate, etc; oil-in-water and water-in-oil emulsion formulations, such as Incomplete Freunds Adjuvant (IFA), avridine and dimethyldioctadecyl ammonium bromide (DDA); adjuvants formed from bacterial cell wall components such as adjuvants including monophosphoryl lipid A (MPL) (Imoto et al. (1985) Tet. Lett. 26:1545-1548), trehalose dimycolate (TDM), and cell wall skeleton (CWS); adjuvants derived from ADP-ribosylating bacterial toxins, such as derived from diphtheria toxin (for example, CRM,₁₉₇, a non-toxic diphtheria toxin mutant (see, e.g., Bixler et al. (1989) Adv. Exp. Med. Biol. 251:175; and Constantino et al. (1992) Vaccine), pertussis toxin (PT), cholera toxin (CT), the E. coli heat-labile toxins (LT1 and LT2), Pseudomonas endotoxin A, C. botulinum C2 and C3 toxins, as well as toxins from C. perfringens, C. spiriforma and C. difficile; saponin adjuvants such as Quil A (U.S. Pat. No. 5,057,540), or particles generated from saponins such as ISCOMs (immunostimulating complexes); cytokines, such as interleukins (e.g., IL-1, IL-2, IL-4, IL-5, IL-6, IL-7, IL-12, etc.), interferons (e.g., γ-interferon), macrophage colony stimulating factor (M-CSF), tumor necrosis factor (TNF), etc; muramyl peptides such as N-acetyl-muramyl-L-threonyl-D-isoglutamine (thr-MDP), N-acetyl-normuramyl-L-alanyl-D-isoglutamine (nor-MDP), N-acetylmuramyl-L-alanyl-D-isoglutaminyl-L-alanine-2-(1′-2′-dipalmitoyl-sn-glycero-3 huydroxyphosphoryloxy)-ethylamine (MTP-PE), etc.; adjuvants derived from the CpG family of molecules, CpG dinucleotides and synthetic oligonucleotides which comprise CpG motifs (see, e.g., Krieg et al. Nature (1995) 374:546 and Davis et al. J. Immunol. (1998) 160:870-876); and synthetic adjuvants such as PCPP (Poly di(carboxylatophenoxy)phosphazene) (Payne et al. Vaccines (1998) 16:92-98). Such adjuvants are commercially available from a number of distributors such as Accurate Chemicals; Ribi Immunechemicals, Hamilton, Mont.; GIBCO; Sigma, St. Louis, Mo.

[0163] The oil in water emulsion, which is especially appropriate for viral vectors, can be based on: light liquid paraffin oil (European pharmacopoeia type), isoprenoid oil such as squalane, squalene, oil resulting from the oligomerization of alkenes, e.g. isobutene or decene, esters of acids or alcohols having a straight-chain alkyl group, such as vegetable oils, ethyl oleate, propylene glycol, di(caprylate/caprate), glycerol tri(caprylate/caprate) and propylene glycol dioleate, or esters of branched, fatty alcohols or acids, especially isostearic acid esters. The oil is used in combination with emulsifiers to form an emulsion. The emulsifiers may be nonionic surfactants, such as: esters of on the one hand sorbitan, mannide (e.g. anhydromannitol oleate), glycerol, polyglycerol or propylene glycol and on the other hand oleic, isostearic, ricinoleic or hydroxystearic acids, said esters being optionally ethoxylated, polyoxypropylene-polyoxyethylene copolymer blocks, such as Pluronic, e.g., L121.

[0164] As to the maleic anhydride-alkenyl derivative copolymers, preference is given to EMA (Monsanto), which are straight-chain or crosslinked ethylene-maleic anhydride copolymers and they are, for example, crosslinked by divinyl ether. Reference is also made to J. Fields et al., Nature 186: 778-780, Jun. 4, 1960. With regard to structure, the acrylic or methacrylic acid polymers and EMA are preferably formed by basic units having the following formula in which: R₁ and R₂, which can be the same or different, represent H or CH₃,x=0 or 1, preferably x=1, y=1 or 2, with x+y=2. For EMA, x=0 and y=2 and for carbomers x=y=1. These polymers are soluble in water or physiological salt solution (20 g/l NaCl) and the pH can be adjusted to 7.3 to 7.4, e.g., by soda (NaOH), to provide the adjuvant solution in which the expression vector(s) can be incorporated. The polymer concentration in the final vaccine composition can range between 0.01 and 1.5% w/v, advantageously 0.05 to 1% w/v and preferably 0.1 to 0.4% w/v.

[0165] It is possible to use the SPT emulsion described on page 147 of “Vaccine Design, The Subunit and Adjuvant Approach” edited by M. Powell and M. Newman, Plenum Press, 1995, and the emulsion MF59 described on page 183 of this same book. For example the adjuvant-containing vaccine is prepared in the following way: 67% v/v of aqueous phase comprising the immunogen are emulsified in 2,3% w/v of anhydromannitol oleate, 2,6% w/v of oleic acid ethoxylated with 11 EO (ethylene oxide) and 28,1% v/v of light liquid paraffin oil (European Pharmacopea type) with the aid of an emulsifying turbomixer.

[0166] An alternative method for preparing the emulsion consists in emulsifying, by passages through a high-pressure homogenizer, a mixture of 5% w/v squalane, 2.5% w/v Pluronic® L121, 0.2% w/v of an ester of oleic acid and of anhydrosorbitol ethoxylated with 20 EO, 92.3% v/v of the aqueous phase comprising the immunogen.

[0167] A further instance of an adjuvant is a compound chosen from the polymers of acrylic or methacrylic acid and the copolymers of maleic anhydride and alkenyl derivative. Advantageous adjuvant compounds are the polymers of acrylic or methacrylic acid which are cross-linked, especially with polyalkenyl ethers of sugars or polyalcohols. These compounds are known by the term carbomer (Phameuropa Vol. 8, No. 2, June 1996). Persons skilled in the art can also refer to U.S. Pat. No. 2,909,462 (incorporated herein by reference) which describes such acrylic polymers cross-linked with a polyhydroxylated compound having at least 3 hydroxyl groups, preferably not more than 8, the hydrogen atoms of at least three hydroxyls being replaced by unsaturated aliphatic radicals having at least 2 carbon atoms. The preferred radicals are those containing from 2 to 4 carbon atoms, e.g. vinyls, allyls and other ethylenically unsaturated groups. The unsaturated radicals may themselves contain other substituents, such as methyl. The products sold under the name Carbopol® (BF Goodrich, Ohio, USA) are particularly appropriate. They are cross-linked with an allyl sucrose or with allyl pentaerythritol. Among then, there may be mentioned Carbopol® 974P, 934P and 971P. Among the copolymers of maleic anhydride and alkenyl derivative, the copolymers EMA® (Monsanto) which are copolymers of maleic anhydride and ethylene, linear or cross-linked, for example cross-linked with divinyl ether, are preferred. Reference may be made to J. Fields et al., Nature, 186 : 778-780, Jun. 4, 1960, incorporated herein by reference.

[0168] The present invention also relates to immunogenic compositions and so-called subunit vaccines, incorporating or comprising or consisting essentially of one or more Tp1-Tp8 proteins of Theileria parva as described in PCT application Serial No. PCT/US2004/022605 incorporated herein by reference in its entirety and advantageously produced by in vitro expression in the manner described herein, as well as a pharmaceutically or veterinarily acceptable carrier or vehicle or excipient. Other proteins of Theileria parva can also be added.

[0169] The pharmaceutically or veterinarily acceptable carriers or vehicles or excipients are well known to the one skilled in the art. For example, a pharmaceutically or veterinarily acceptable carrier or vehicle or excipient can be a 0.9% NaCl (e.g., saline) solution or a phosphate buffer. Other pharmaceutically or veterinarily acceptable carrier or vehicle or excipients that can be used for methods of this invention include, but are not limited to, poly-(L-glutamate) or polyvinylpyrrolidone. The pharmaceutically or veterinarily acceptable carrier or vehicle or excipients may be any compound or combination of compounds facilitating the administration of the vector (or protein expressed from an inventive vector in vitro); advantageously, the carrier, vehicle or excipient may facilitate transfection and/or improve preservation of the vector (or protein). Doses and dose volumes are herein discussed in the general description and can also be determined by the skilled artisan from this disclosure read in conjunction with the knowledge in the art, without any undue experimentation.

[0170] The cationic lipids containing a quaternary ammonium salt which are advantageously but not exclusively suitable for plasmids, are advantageously those having the following formula: [chemical structure]
in which R₁ is a saturated or unsaturated straight-chain aliphatic radical having 12 to 18 carbon atoms, R₂ is another aliphatic radical containing 2 or 3 carbon atoms and X is an amine or hydroxyl group, e.g. the DMRIE. In another embodiment the cationic lipid can be associated with a neutral lipid, e.g. the DOPE.

[0171] Among these cationic lipids, preference is given to DMRIE (N-(2-hydroxyethyl)-N,N-dimethyl-2,3-bis(tetradecyloxy)-1-propane ammonium; WO96/34109), advantageously associated with a neutral lipid, advantageously DOPE (dioleoyl-phosphatidyl-ethanol amine; Behr J. P., 1994, Bioconjugate Chemistry, 5, 382-389), to form DMRIE-DOPE.

[0172] Advantageously, the plasmid mixture with the adjuvant is formed extemporaneously and advantageously contemporaneously with administration of the preparation or shortly before administration of the preparation; for instance, shortly before or prior to administration, the plasmid-adjuvant mixture is formed, advantageously so as to give enough time prior to administration for the mixture to form a complex, e.g. between about 10 and about 60 minutes prior to administration, such as approximately 30 minutes prior to administration.

[0173] When DOPE is present, the DMRIE:DOPE molar ratio is advantageously about 95: about 5 to about 5 :about 95, more advantageously about 1: about 1, e.g., 1:1.

[0174] The DMRIE or DMRIE-DOPE adjuvant:plasmid weight ratio can be between about 50: about 1 and about 1: about 10, such as about 10: about 1 and about 1:about 5, and advantageously about 1: about 1 and about 1: about 2, e.g., 1:1 and 1:2.

[0175] In a specific embodiment, the pharmaceutical composition is directly administered in vivo, and the encoded product is expressed by the vector in the host. The methods of in vivo delivery of a vector encoding a Theileria parva peptide (see, e.g., U.S. Pat. No. 6,423,693; patent publications EP 1052286, EP 1205551, U.S. patent publication 20040057941, WO 9905300 and Draghia-Akli et al., Mol Ther. (2002);6: 830-6; the disclosures of which are incorporated by reference in their entireties) can be modified to deliver the peptides of the present invention to a bovine. The in vivo delivery of a vector encoding a Theileria parva peptide described herein can be accomplished by one of ordinary skill in the art given the teachings of the above-mentioned references.

[0176] Advantageously, the pharmaceutical and/or therapeutic compositions and/or formulations according to the invention comprise or consist essentially of or consist of an effective quantity to elicit a therapeutic response of one or more expression vectors and/or polypeptides as discussed herein; and, an effective quantity can be determined from this disclosure, including the documents incorporated herein, and the knowledge in the art, without undue experimentation.

[0177] One skilled in the art can determine the effective plasmid dose to be used for each immunization or vaccination protocol and species from this disclosure and the knowledge in the art.

[0178] These methods can comprise, consist essentially of or consist of the administration of an effective quantity of an immunogenic composition or vaccine according to the invention. This administration can be by the parenteral route, e.g. by subcutaneous, intradermic (e.g., by ear) or intramuscular administration, and/or by oral and/or nasal routes. Advantageously, this administration is intramuscularly or subcutaneously. One or more administrations can take place, such as two administrations.

[0179] A needlefree liquid jet injector or powder jet injector can inject vaccines or immunogenic compositions. For plasmids it is also possible to use gold particles coated with plasmid and ejected in such a way as to penetrate the cells of the skin of the subject to be immunized (Tang et al., Nature 1992, 356, 152-154). Other documents cited and incorporated herein may be consulted for administration methods and apparatus of vaccines or immunogenic compositions of the invention. The needlefree injector can also be for example Biojector 2000 (Bioject Inc., Portland Oreg. USA).

[0180] Advantageously, the immunogenic compositions and vaccines according to the invention comprise or consist essentially of or consist of an effective quantity to elicit an immunological response and/or a protective immunological response of one or more expression vectors and/or polypeptides as discussed herein; and, an effective quantity can be determined from this disclosure, including the documents incorporated herein, and the knowledge in the art, without undue experimentation.

[0181] In the case of therapeutic and/or pharmaceutical compositions based on a plasmid vector, a dose can comprise, consist essentially of or consist of, in general terms, about in 1 μg to about 2000 μg, advantageously about 50 μg to about 1000 μg and more advantageously from about 100 μg to about 800 μg of plasmid expressing a Theileria parva peptide. When the therapeutic and/or pharmaceutical compositions based on a plasmid vector is administered with electroporation the dose of plasmid is generally between about 0.1 μg and 1 mg, advantageously between about 1 μg and 100 μg, advantageously between about 2 μg and 50 μg. The dose volumes can be between about 0.1 and about 2 ml, advantageously between about 0.2 and about 1 ml. These doses and dose volumes are suitable for the treatment of bovines and other mammalian target species.

[0182] The therapeutic and/or pharmaceutical composition contains per dose from about 10⁴ to about 10¹¹, advantageously from about 10⁵ to about 10¹⁰ and more advantageously from about 10⁶ to about 10⁹ viral particles of recombinant adenovirus expressing a Theileria parva peptide. In the case of therapeutic and/or pharmaceutical compositions based on a poxvirus, a dose can be between about 10² pfu and about 10⁹ pfu. The pharmaceutical composition contains per dose from about 10⁵ to 10⁹, advantageously from about 10⁶ to 10⁸ pfu of poxvirus or recombinant expressing a Theileria parva peptide.

[0183] The dose volume of immunogenic and vaccine compositions for target species such as bovines, e.g., the dose volume of equine immunogenic or vaccine compositions, based on viral vectors, e.g., non-poxvirus-viral-vector-based immunogenic or vaccine compositions, is generally between about 0.5 and about 2.5 ml, such as between about 0.5 and about 2.0 ml, preferably between about 1.0 and about 2.0 ml, preferably about 1.0 ml. Also in connection with such a vaccine or immunogenic composition, from the disclosure herein and the knowledge in 30 the art, the skilled artisan can determine the number of administrations, the administration route, and the doses to be used for each immunization or vaccination protocol, without any undue experimentation. For instance, there can be two administrations, e.g. at 35 day intervals.

[0184] In the case of subunit immunogenic compositions or subunit vaccines, with reference to the amount of active ingredient, e.g., subunit (antigen, immunogen, epitope) a dose comprises or consists essentially of or consists of, in general terms, about 10 μg to about 2000 μg, advantageously about 50 μg to approximately 1000 μg. The dose volume of such immunogenic or vaccine compositions for target species that are mammals, e.g., for equines, is generally between about 1.0 and about 2.0 ml, preferably between about 0.5 and about 2.0 ml and more advantageously about 1.0 ml. Also for such a vaccine or immunogenic composition, the skilled artisan, from this disclosure and the knowledge in the art, can, without any undue experimentation, determine the number of administrations, the administration route and the doses to be used for each immunization or vaccination protocol.

[0185] In an advantageous embodiment, the pharmaceutical and/or therapeutic compositions and/or formulations according to the invention are administered by injection, such as, but not limited to, intramuscular (IM), subcutaneous (SC) injection or intradermal (ID) injection. The injection may also be by needlefree delivery.

[0186] Also in connection with such a therapeutic composition, from the disclosure herein and the knowledge in the art, the skilled artisan can determine the number of administrations, the administration route, and the doses to be used for each injection protocol, without any undue experimentation.

[0187] In an advantageous embodiment, the recombinant vaccine can be administered to a bovine or infected or transfected into cells in an amount of about at least 10³ pfu; more preferably about 10⁴ pfu to about 10¹⁰ pfu, e.g., about 10⁵ pfu to about 10⁹ pfu, for instance about 10⁶ pfu to about 10⁸ pfu, per dose, for example, per 2 ml dose. In a particularly advantageous embodiment, the dose is about 10⁸ pfu per dose.

[0188] The method includes at least one administration to an animal of an efficient amount of the therapeutic composition according to the invention. The animal may be male, female, pregnant female and newborn. This administration may be notably done by intramuscular (IM), intradermal (ID) or subcutaneous (SC) injection. In an advantageous embodiment, the therapeutic composition according to the invention can be administered by a syringe or a needleless apparatus (such as, for example Bovinejet, Biojector or Vitajet (Bioject, Oregon, USA)). Another approach to administer plasmid is to use electroporation see, e.g. S. Tollefsen et al. Vaccine, 2002, 20, 3370-3378; S. Tollefsen et al. Scand. J. Immunol., 2003, 57, 229-238; S. Babiuk et al., Vaccine, 2002, 20, 3399-3408; PCT Application No. WO99/01158.

[0189] The invention relates to the use of the pharmaceutical compositions for vaccinating in animals against Theileria parva infection. In an advantageous embodiment, the animal is a bovine.

[0190] Animals immunized with immunogenic compositions or vaccines according to the invention develop a specific immunity against Theileria parva, which during a Theileria parva infection involves a decrease of the blood-borne protozoa, and indeed can totally block the protozoa, as compared with unvaccinated control animals. This advantageous aspect of the invention may be used to stop the transmission of the Theileria parva, to limit the existence of protozoal reservoirs and to prevent outbreaks of East coast fever, notably in bovines.

[0191] Another advantageous aspect of the invention is that protective immunity can be transmitted from vaccinated subjects to the offspring.

[0192] According to the invention, the vaccination against the Theileria parva can be combined with other vaccinations within the framework of vaccination programs, in the form of immunization or vaccination kits or methods, or in the form of multivalent immunogenic compositions and multivalent vaccines, i.e. comprising or consisting essentially of at least one vaccine component against the Theileria parva and at least one vaccine component against at least one other pathogenic agent. This also includes the expression by the same expression vector of genes of at least two pathogenic agents, including the Theileria parva.

[0193] The invention thus also relates to a multivalent or “cocktail” immunogenic composition or a multivalent or “cocktail” vaccine against the Theileria parva and against at least one other pathogen of the target species, using the same in vivo expression vector containing and expressing at least one polynucleotide of the Theileria parva according to the invention and at least one polynucleotide expressing an immunogen of another pathogen. As to combination or multivalent or “cocktail” immunogenic compositions or vaccines, as well as to immunogens or antigens or epitopes thereof to be in or expressed by such compositions or vaccines, attention is directed to herein cited and incorporated by reference documents, as well as to U.S. Pat. Nos. 5,843,456 and 6,368,603.

[0194] The “immunogen” expressed by a vector of the invention or used in multivalent or “cocktail” compositions or vaccines is understood to mean a protein, glycoprotein, polypeptide, peptide, epitope or derivative, e.g. fusion protein, inducing an immune response, preferably of a protective nature.

[0195] As discussed herein, these multivalent compositions or vaccines can also comprise or consist essentially of a pharmaceutically or veterinarily acceptable carrier or vehicle or excipient, and optionally an adjuvant.

[0196] The invention also relates to a multivalent immunogenic composition or a multivalent vaccine comprising at least one in vivo expression vector in which at least one polynucleotide of the Theileria parva is inserted (and expressed in vivo) and at least a second expression vector in which a polynucleotide encoding an immunogen of another pathogenic agent is inserted (and expressed in vivo). Such multivalent compositions or vaccines also comprise or consist essentially of a pharmaceutically or veterinarily acceptable carrier or vehicle or excipient, and optionally an adjuvant.

[0197] For antigen(s) or immunogen(s) or epitope(s) to be included in or expressed by a multivalent immunogenic composition or vaccine (in addition to Theileria parva antigen(s), immunogen(s) or epitope(s)), including as to determining or ascertaining epitope(s), the skilled artisan may consult herein cited documents and documents cited in herein cited documents, all of which are incorporated by reference into the instant application.

[0198] The immunogenic compositions or vaccines as discussed herein can also be combined with at least one conventional vaccine (e.g., inactivated, live attenuated, or subunit) directed against the same pathogen or at least one other pathogen of the species to which the composition or vaccine is directed. The immunogenic compositions or vaccines discussed herein can be administered prior to or after the conventional vaccine, e.g., in a “prime-boost” regimen.

[0199] The invention further comprehends combined vaccination employing immunogenic composition(s) and subunit vaccine(s) according to the invention. Thus, the invention also relates to multivalent immunogenic compositions and multivalent vaccines comprising one or more proteins according to the invention and one or more immunogens (as the term immunogen is discussed herein) of at least one other pathogenic agent (advantageously from among those herein and in documents cited and incorporated herein by reference) and/or another pathogenic agent in inactivated or attenuated form or as a subunit. In the manner described, these multivalent vaccines or compositions also contain, consist essentially of or consist of a pharmaceutically or veterinarily acceptable vehicle or excipient and optionally one or more adjuvants.

[0200] The present invention also relates to methods for the immunization and vaccination of a target species, e.g., as discussed herein.

[0201] The present invention also relates to methods for the immunization and/or vaccination of a target species, using a prime-boost regimen. The term of “prime-boost” refers to the successive administrations of two different vaccine types or immunogenic or immunological composition types having at least one immunogen in common. The priming administration (priming) is the administration of a first vaccine or immunogenic or immunological composition type and may comprise one, two or more administrations. The boost administration is the administration of a second vaccine or immunogenic or immunological composition type and may comprise one, two or more administrations, and, for instance, may comprise or consist essentially of annual administrations.

[0202] An embodiment of a prime-boost immunization or vaccination against Theileria parva according to the invention is a prime-boost immunization or vaccination wherein the animal is first administered a (priming) DNA vaccine or immunological or immunogenic composition comprising or consisting essentially of and expressing in vivo at least one immunogen, antigen or epitope of Theileria parva, and thereafter is administered (boosted with) a second type of vaccine or immunogenic or immunological composition containing or consisting essentially of or expressing at least one immunogen, antigen or epitope that is common to the priming vaccine or immunogenic or immunological composition. This second type of vaccine can be a an inactivated, or attenuated or subunit vaccine or immunogenic or immunological composition or a vector, e.g., recombinant or modified virus vaccine or immunogenic or immunological composition that has in vivo expression (e.g. poxvirus, herpesvirus, adenovirus). Poxviruses may be advantageously employed, e.g., attenuated vaccinia viruses, like NYVAC or MVA, and avipox viruses, like canarypox viruses and fowlpox viruses.

[0203] Advantageously, the DNA vaccine is intended to induce a priming immune response specific for the expressed immunogen, antigen or epitope or “DNA induced immune response” (such as a gamma-interferon+(IFNγ⁺) T cell memory response specific for the expressed immunogen, antigen or epitope) which is boostable (can be boosted) by a subsequent administration (boost) of an inactivated vaccine or immunological composition or a live recombinant vaccine comprising or consisting essentially of a viral vector, such as a live recombinant poxvirus, containing or consisting essentially of and expressing in vivo at least the same immunogen(s) or antigen(s) or epitope(s) expressed by the DNA vaccine. The IFNγ⁺ T cell memory response specific for the expressed Theileria parva immunogen can be shown in a quantitative enzyme-linked immune spot (ELISPOT) assay using peripheral blood mononuclear cells (PBMCs) (Laval et al., Vet. Immunol. Immunopathol., 2002, 90: 191-201).

[0204] The “boost” may be administered from about 2 weeks to about 6 months after the “priming”, such as from about 3 to about 8 weeks after the priming, and advantageously from about 3 to about 6 weeks after the priming, and more advantageously, about 4 weeks after the priming.

[0205] The invention also relates to kits for performing prime-boost methods comprising or consisting essentially of a priming vaccine or immunological or immunogenic composition and a boost vaccine or immunological or immunogenic compositions in separate containers, optionally with instructions for admixture and/or administration.

[0206] The amounts (doses) administered in the priming and the boost and the route of administration for the priming and boost can be as herein discussed, such that from this disclosure and the knowledge in the art, the prime-boost regimen can be practiced without undue experimentation. Furthermore, from the disclosure herein and the knowledge in the art, the skilled artisan can practice the methods, kits, etc. herein with respect to any of the herein-mentioned target species.

[0207] One aspect of the present invention, therefore, is an avipox expression vector comprising a polynucleotide that encodes a Theileria parva polypeptide. In one embodiment of this aspect of the invention, the Theileria parva polypeptide may be selected from the group consisting of Tp1, Tp2, Tp3, Tp4, Tp5, Tp6, Tp7 and Tp8. In various embodiments of the invention, the Theileria parva polypeptide comprises an amino acid sequence according to any of the group consisting of SEQ ID NOs: 7, 16, 26, 30, 32, 39, 44-50, or a fragment thereof.

[0208] In other embodiments of the invention, the polynucleotide comprises a nucleotide base sequence according to any of the group consisting of SEQ ID NOs: 1, 6, 12, 15, 17, 19, 24, 25, 29, 33, 36, 38, 43, 51-60, or the complement thereof.

[0209] In yet another embodiment of the invention, the polynucleotide comprises a nucleotide sequence of the Theileria parva strain Muguga whole genome shotgun sequencing project, any fragment thereof or any complement thereof (see, e.g., Gardner et al., Science. 2005 Jul. 1; 309(5731):134-137, the disclosure of which is incorporated by reference) wherein SEQ ID NO: 69 corresponds to GenBank Accession No. AAGK01000001, Theileria parva polypeptide strain Muguga chromosome 1 chr1_complete, whole genome shotgun sequence; SEQ ID NO: 70 corresponds to GenBank Accession No. AAGK01000002, Theileria parva polypeptide strain Muguga chromosome 2 chr2_complete, whole genome shotgun sequence; SEQ ID NO: 71 corresponds to GenBank Accession No. AAGK01000003, Theileria parva polypeptide strain Muguga chromosome 4 ctg_{—}528, whole genome shotgun sequence; SEQ ID NO: 72 corresponds to GenBank Accession No. AAGK01000004, Theileria parva polypeptide strain Muguga chromosome 4 ctg_{—}529, whole genome shotgun sequence; SEQ ID NO: 73 corresponds to GenBank Accession No. AAGK01000005, Theileria parva polypeptide strain Muguga chromosome 3 ctg_{—}530, whole genome shotgun sequence; SEQ ID NO: 74 corresponds to GenBank Accession No. AAGK01000006, Theileria parva polypeptide strain Muguga chromosome 3 ctg_{—}531, whole genome shotgun sequence; SEQ ID NO: 75 corresponds to GenBank Accession No. AAGK01000007, Theileria parva polypeptide strain Muguga chromosome 3 ctg_{—}545, whole genome shotgun sequence; SEQ ID NO: 76 corresponds to GenBank Accession No. AAGK01000008, Theileria parva polypeptide strain Muguga chromosome 3 ctg_{—}546, whole genome shotgun sequence and SEQ ID NO: 77 corresponds to GenBank Accession No. AAGK01000009, Theileria parva polypeptide strain Muguga apicoplast, complete genome, whole genome shotgun sequence. In an advantageous embodiment, the polynucleotide encodes a Theileria parva polypeptide.

[0210] In the various embodiments of the invention, the avipox expression vector is an attenuated avipox expression vector. In one embodiment, the avipox expression vector is a canarypox vector. In an advantageous embodiment the attenuated canarypox vector is ALVAC.

[0211] In yet other embodiments of this aspect of the invention, the avipox expression vector is a fowlpox vector. In one embodiment, the attenuated fowlpox vector is TROVAC.

[0212] Another aspect of the invention is a formulation for delivery and expression of a Theileria parva polypeptide, wherein the formulation comprises an avipox expression vector comprising a polynucleotide that encodes a Theileria parva immunogen, and a pharmaceutically or veterinarily acceptable carrier, vehicle or excipient.

[0213] In one embodiment of the invention, the formulation may comprise an attenuated vaccinia virus comprising a polynucleotide having a nucleotide base sequence capable of hybridizing under stringent conditions to a nucleotide base sequence selected from the group consisting of SEQ ID NOs: 1, 6, 12, 15, 17, 19, 24, 25, 29, 33, 36, 38, 43, 51-60, or the complement thereof, and wherein the stringent hybridizing conditions are selected from (a) 40 to 45% formamide, 1 M NaCl, 1% SDS at 37° Celsius, and a wash in 0.5-1×SSC at 55 to 60° Celsius and (b) 50% formamide, 1 M NaCl, 1% SDS at 37° Celsius, and a wash in 0.1×SSC at 60 to 65° Celsius, and wherein the nucleotide base sequence has between about 75% and about 100%, between about 80% and about 100%, between about 85% and about 100%, between about 90% and about 100%, between about 95% and about 100%, between about 75% and about 90%, between about 80% and about 90%, between about 85% and about 100%, or between about 85% and about 95%, between about 85% and about 90% homology with a nucleotide sequence seletected from the group consisting of SEQ ID NOs: 1, 6, 12, 15, 17, 19, 24, 25, 29, 33, 36, 38, 43, 51-60, or the complement thereof.

[0214] In this aspect of the invention, one embodiment further comprises an attenuated vaccinia virus comprising a polynucleotide comprises a nucleotide base sequence according to any of the group consisting of SEQ ID NOs: 1, 6, 12, 15, 17, 19, 24, 25, 29, 33, 36, 38, 43, 51-60, or the complement thereof, or a fragment thereof. In another embodiment, the attenuated vaccinia virus is NYVAC.

[0215] Yet another aspect of the invention is a formulation for delivery and expression of a Theileria parva polypeptide, wherein the formulation comprises an avipox expression vector comprising a nucleotide base sequence according to any of the group consisting of SEQ ID NOs: 1, 6, 12, 15, 17, 19, 24, 25, 29, 33, 36, 38, 43, 51-60, or the complement thereof, or a fragment thereof, and wherein the avipox expression vector is an attenuated avipox expression vector, a canarypox vector, a fowlpox vector or an attenuated vaccinia virus. In one embodiment of this aspect, the fowlpox vector is TROVAC. In still another embodiment, the canarypox vector is an attenuated canarypox vector, advantageously ALVAC. In yet another embodiment, the attenuated vaccinia virus is NYVAC.

[0216] Another aspect of the invention is a method of delivering a Theileria parva antigen to an animal, comprising administering to the animal a formulation for delivery and expression of a Theileria parva immunogen, wherein the formulation comprises an avipox expression vector comprising a nucleotide base sequence according to any of the group consisting of SEQ ID NOs: 1, 6, 12, 15, 17, 19, 24, 25, 29, 33, 36, 38, 43, 51-60, or the complement thereof, and wherein the avipox expression vector is an attenuated avipox expression vector, a canarypox vector, a fowlpox vector or an attenuated vaccinia virus.

[0217] One embodiment of the invention is a method of eliciting an immune response against a strain of Theileria in an animal, comprising administering a formulation for delivery and expression of a Theileria parva polypeptide, wherein the formulation comprises an avipox expression vector comprising a nucleotide base sequence according to any of the group consisting of SEQ ID NOs: 1, 6, 12, 15, 17, 19, 24, 25, 29, 33, 36, 38, 43, 51-60, or the complement thereof, and wherein the avipox expression vector is an attenuated avipox expression vector, a canarypox vector, an attenuated canarypox vector, a fowlpox vector or an attenuated vaccinia virus and in an effective amount for eliciting an immune response.

[0218] Still another embodiment of the invention is a method of inducing an immunological or protective response against a strain of Theileria in an animal, comprising administering to the animal an effective amount of a formulation for delivery and expression of a Theileria parva immunogen, wherein the formulation comprises an avipox expression vector comprising a polynucleotide that encodes a Theileria parva immunogen and a pharmaceutically or veterinarily acceptable carrier, vehicle or excipient.

[0219] A method of eliciting an immune response against a strain of Theileria in an animal, comprising administering a composition comprising a cell, wherein the cell comprises an avipox expression vector comprising a polynucleotide that encodes a Theileria parva immunogen.

[0220] Another aspect of the invention is a kit for performing a method of inducing an immunological or protective response against a strain of Theileria in an animal comprising an avipox expression vector comprising a nucleotide base sequence that encodes a Theileria parva immunogen, or the complement thereof, and wherein the avipox expression vector is an attenuated avipox expression vector, a canarypox vector, an attenuated canarypox vector, a fowlpox vector or an attenuated vaccinia virus, and instructions for performing the method of delivery and expression of the vector in the animal.

[0221] Another embodiment of the invention is a kit for performing a method of inducing an immunological or protective response against a strain of Theileria in an animal comprising an avipox expression vector comprising a nucleotide base sequence according to any of the group consisting of SEQ ID NOs: 1, 6, 12, 15, 17, 19, 24, 25, 29, 33, 36, 38, 43, 51-60, or the complement thereof, and wherein the avipox expression vector is an attenuated avipox expression vector, a canarypox vector, a fowlpox vector or an attenuated vaccinia viand and instructions for performing the method of delivery and expression of the vector in an effective amount for eliciting an immune response in the animal.

[0222] It should be understood that the present invention is not limited to the specific compositions or methods described herein and that any composition having a formula or method steps equivalent to those described falls within the scope of the present invention. Preparation routes of the composition and method steps are merely exemplary so as to enable one of ordinary skill in the art to make the composition and use it according to the described process and its equivalents. It will also be understood that although the form of the invention shown and described herein constitutes advantageous embodiments of the invention, it is not intended to illustrate all possible forms of the invention. The words are words of description rather than of limitation. Various changes and variations may be made to the present invention without departing from spirit and scope of the invention.

[0223] The invention is further illustrated by the following non-limiting examples:

### EXAMPLE 1

### Generation of Targeted Gene List

[0224] Preliminary contigs of the T. parva genome were loaded into an annotation database at TIGR and subjected to an automated process that searched the T. parva contigs against a non-redundant database of proteins extracted from GenBank. The search results were used to produce a set of putative T. parva genes that encoded proteins similar to those in other organisms. This set of gene models was used to train the gene finding programs GlimmerM (Salzberg et al., (1999) Genomics 59: 24) and phat (Cawley et al., (2001) Biochem. Parasitol. 118: 167-), which were subsequently run against all of the preliminary contigs to produce gene models for the entire preliminary genome sequence. The proteins encoded by the predicted T. parva genes on chromosome 1 were subjected to database searches (blastp), predictions of signal peptides and signal anchors (SignalP-2.0 database) and transmembrane domains (TMHMM database). Fifty-five genes (Table 1) encoding candidate antigens were selected for cloning and her screening.

TABLE 1
Targeted gene list.

| Gene | Locus | Size | |
|---|---|---|---|
| ID | TP01- | (kb) | Protein |
| 1 | 0705 | 1.0 | hypothetical protein, |
| | | | conserved |
| 2 | 0200 | 0.4 | 40S ribosomal |
| | | | protein S16, putative |
| 3 | 0727 | 1.4 | glutamyl-tRNA |
| | | | synthetase, putative |
| 4 | 0424 | 0.5 | hypothetical protein |
| 5 | 0056 | 0.5 | hypothetical protein |
| 6 | 0493 | 0.7 | hypothetical protein |
| 7 | 1144 | 0.7 | hypothetical protein |
| 8 | 1145 | 0.7 | hypothetical protein |
| 9 | 0379 | 0.7 | hypothetical protein |
| 10 | 0378 | 0.7 | hypothetical protein |
| 11 | 0609 | 0.8 | Tash1 protein, |
| | | | putative |
| 12 | 0868 | 0.8 | hypothetical protein |
| 13 | 0095 | 0.8 | hypothetical protein |
| 14 | 0605 | 0.8 | Tash1 protein, |
| | | | putative |
| 15 | 0035 | 1.1 | DNA J protein, |
| | | | putative |
| 16 | 1013 | 1.1 | MtN3/RAG1IP |
| | | | protein, putative |
| 17 | 0603 | 1.0 | TashAT2 protein, |
| | | | putative |
| 18 | 0616 | 0.9 | Tash1 protein, |
| | | | putative |
| 19 | 0188 | 0.8 | prohibitin, putative |
| 20 | 1011 | 1.1 | hypothetical protein |
| 21 | 0719 | 1.1 | hypothetical protein |
| 22 | 1220 | 1.0 | hypothetical protein |
| 23 | 0914 | 1.1 | hypothetical protein |
| 24 | 0476 | 1.1 | aspartate |
| | | | carbamoyltransferase, |
| | | | putative |
| 25 | 0334 | 1.2 | hypothetical protein |
| 26 | 0967 | 1.6 | hypothetical protein |
| 27 | 0613 | 1.3 | Tash1 protein, |
| | | | putative |
| 28 | 0604 | 1.4 | TashAT3 protein, |
| | | | putative |
| 29 | 1069 | 1.4 | monosaccharide |
| | | | transporter, |
| | | | putative |
| 30 | 0016 | 2.7 | sortilin, putative |
| 31 | 0002 | 1.4 | hypothetical |
| | | | telomeric SfiI |
| | | | fragment 20 |
| | | | protein 2 |
| 32 | 0960 | 1.4 | hypothetical |
| | | | protein |
| 33 | 0615 | 1.4 | Tash1 protein, |
| | | | putative |
| 34 | 0715 | 1.4 | hypothetical |
| | | | protein |
| 35 | 0006 | 1.5 | hypothetical |
| | | | protein |
| 36 | 0487 | 1.4 | hypothetical |
| | | | protein |
| 37 | 0862 | 1.6 | GMP synthase, |
| 38 | 0401 | 1.5 | putative |
| | | | hypothetical |
| | | | protein, |
| | | | conserved |
| 39 | 1091 | 1.7 | hypothetical |
| | | | protein |
| 40 | 0701 | 1.8 | hypothetical |
| | | | protein |
| 41 | 0274 | 1.8 | hypothetical |
| | | | protein |
| 42 | 0289 | 3.0 | hypothetical |
| | | | protein |
| 43 | 0700 | 2.1 | hypothetical |
| | | | protein |
| 44 | 0509 | 1.9 | hypothetical |
| | | | protein |
| 45 | 1185 | 2.0 | hypothetical |
| | | | protein |
| 46 | 0031 | 2.0 | Glutamyl-tRNA |
| | | | amidotransferase |
| | | | subunit B, |
| | | | putative |
| 47 | 0561 | 2.5 | hypothetical |
| | | | protein |
| 48 | 0408 | 2.9 | hypothetical |
| | | | protein |
| 49 | 0987 | 3.0 | hypothetical |
| | | | protein |
| 50 | 0397 | 3.1 | Alpha- |
| | | | aminoacylpeptide |
| | | | hydrolase, |
| | | | putative |
| 51 | 0144 | 3.7 | hypothetical |
| | | | protein |
| 52 | 0256 | 4.1 | hypothetical |
| | | | protein |
| 53 | 0575 | 5.2 | hypothetical |
| | | | protein, |
| | | | conserved |
| 54 | 0539 | 6.5 | hypothetical |
| | | | protein |
| 55 | 0438 | 4.3 | hypothetical |
| | | | protein, |
| | | | conserved |

### EXAMPLE 2

### Therileria parva Antigens for Expression in Viral Vectors

[0225] To demonstrate the efficacy of different experimental vaccines based upon a increase of antigen-specific cell mediated immunity and a protection against experimental challenge, t gene candidates selected on bioinformatics and CTL screening (methods described in Examples 14-16) and are listed in Table 2.

TABLE 2

| | | | | | Limits | |
|---|---|---|---|---|---|---|
| | | | | | of | BoLA |
| | | | | Signal | Signal | classI |
| Name | Origin | Identity | Size | Peptide | Peptide | haplotype |
| Tp1 | cDNA | unknown | 61 kDa | Yes | 1-19 | A18 |
| Tp2 | Genome + | unknown | 19 kDa | Yes | 1-23 | T2a |
| | CTL | | | | | |
| Tp3 | Genome + | unknown | 29 kDa | Yes | 1-16 | |
| | CTL | | | | | |
| Tp4 | cDNA | TCP-1 | 63 kDa | No | | A10 |
| | | (chaperone) | | | | |
| Tp5 | cDNA | EIF-1a | 18 kDa | No | | T5 |
| Tp6 | Genome + | Prohibitin | 31 kDa | Yes | 1-29 | |
| | CTL | | | | | |
| Tp7 | cDNA | Hsp90 | 84 kDa | No | | |
| | | (chaperone) | | | | |
| Tp8 | cDNA | Cysteine | 50 kDa | Yes | | A10 |
| | | protease | | (anchor) | | |

[0226] The amino acid sequence of Tp1 (SEQ ID NO 45) encoded by SEQ ID NO: 50 is shown in FIG. 6H, the amino acid sequence of Tp4 (SEQ ID NO 46) encoded by SEQ ID NO: 51 is shown in FIG. 6I, the amino acid sequence of Tp5 (SEQ ID NO 47) encoded by SEQ ID NO: 52 is shown in FIG. 6J, the amino acid sequence of Tp7 (SEQ ID NO 48) (GenBank Accession No. P24724) encoded by SEQ ID NO: 53 is shown in FIG. 6L and the amino acid sequence of Tp8 (SEQ ID NO: 49) encoded by SEQ ID NO: 54 is shown in FIG. 6M.

[0227] The nucleotide sequence SEQ ID NO: 50 (GenBank Accession No. CS008930) encoding the amino acid sequence ofTp1 (SEQ ID NO 45) is shown in FIG. 32, the nucleotide sequence SEQ ID NO: 51 (GenBank Accession No. CS008931) encoding the amino acid sequence of Tp4 (SEQ ID NO 46) is shown in FIG. 33, the nucleotide sequence SEQ ID NO: 52 (GenBank Accession No. CS008932) encoding the amino acid sequence of Tp5 (SEQ ID NO 47) is shown in FIG. 34, the nucleotide sequence SEQ ID NO: 53 (GenBank Accession No. CS008933) encoding the amino acid sequence of Tp7 (SEQ ID NO 48) is shown in FIG. 48 and the nucleotide sequence SEQ ID NO: 54 (GenBank Accession No. CS008934) encoding the amino acid sequence of Tp8 (SEQ ID NO: 49) is shown in FIG. 49.

### EXAMPLE 3

### Cloning of Targeted Genes

[0228] All the constructions are implemented using standard molecular biology methods (cloning, digestion by restriction enzymes, synthesis of a complementary single-strand DNA, polymerase chain reaction, elongation of an oligonucleotide by DNA polymerase, etc.) described, for example, by Sambrook J. et al. (Molecular Cloning: A Laboratory Manual, 2nd edition, Cold Spring Harbor Laboratory, Cold Spring Harbor. N.Y., 1989).

[0229] Open reading frames (ORFs) less than 3.1 kb were amplified by OneStep RT-PCR kit (QIAGEN Ltd., Crawley, UK) using RNA purified from T. parva (Muguga) schizont-infected lymphoblasts. PCR thermal cycles were (for genes up to 1 kb): 50° Celsius, 30 mins; 95° Celsius, 15 mins; 94° Celsius, 30 secs; 55° Celsius, 30 secs; 72° Celsius, 1 min.; 35 times from 94° Celcius cycle and finally 72° Celsius, 10 mins For genes between 1 and 2 kb conditions were: 50° Celsius, 30 mins; 95° Celsius, 15 mins; 94° Celsius, 1 minute; 55° Celsius, 1 minute; 72° Celsius, 1 minute; 35 times from 94° Celsius cycle and finally 72° Celsius, 10 mins. Genes between 2 and 3 kb: 45° Celsius 30 mins; 95° Celsius, 15 mins; 94° Celsius, 10 secs; 55° Celsius, 1 minute; 68° Celsius, 3 mins; 35 times from 94° Celsius cycle and finally 68° Celsius 10 mins. Amplified genes were purified from agarose gels by QlAquick Gel Extraction kit (QIAGEN) and cloned into the eukaryotic expression T-vector pTargeT (Promega, Madison, Wis., USA). Ligated samples were electroporated into host E. coli JM109, and colonies were screened by PCR using gene specific internal forward primers and vector specific reverse primer SEQ ID NO: 66 (5′-GAGCGGATAACATCACACAGG-3′). Plasmids from positive colonies were purified by QIAprep Spin Miniprep kit (QIAGEN) and sequenced by ABI PRISM 377 DNA sequencer (Applied Biosystems, Foster City, Calif., USA).

### EXAMPLE 4

### Construction of Recombinant ALVAC Constructs

[0230] The coding sequence of a mouse B-cell epitope of SV5 P/V protein, Pk-Tag, was PCR-amplified from pSC11-85A using XhoTag forward primer (SEQ ID NO: 67) 5′-CTCGAGTCCTACATACCATCTGCCGAAAAG-3′ and Tag reverse primer (SEQ ID NO: 68) 5′-TCAGTCTAGTCCTAGCAAAGGG-3′. The amplified fragment was cloned into pGEM-T Easy vector (Promega) to make pGEMTag. ORFs of T. parva polypeptides Tp1, Tp2, Tp4, Tp5 and Tp8 excluding the stop codons were amplified by OneStep RT-PCR (Qiagen) using Tp-gene specific primers and RNA extracted from purified schizonts. Amplified fragments were purified by QIAquick PCR Purification Kit (Qiagen), treated with T4 DNA polymerase and digested with Xho I. PCR fragments were ligated with pGEMTag, which was digested with Spe I and treated with Klenow enzyme, then digested with Xho I to form pGEMTp1Tag, pGEMTp2Tag, pGEMTp4Tag, pGEMTp5Tag, and pGEMTp8Tag. These plasmids were used as templates to amplify Tp-Tag fusion genes by PCR using Tp gene-specific forward primers and Tag reverse primer. PCR fragments were purified from agarose gels by QIAquick Gel Extraction Kit (Qiagen), treated with T4 DNA polymerase and cloned into pSG2 DNA vaccine plasmids (McConkey et al., (2003) Nat. Med. 9: 729) to form pSG2Tp1Tag, pSG2Tp2Tag, pSG2Tp4Tag, pSG2Tp5Tag, pSG2Tp8Tag. All plasmids were sequenced and the expression of Tp antigens were confirmed by immunostaining of transfected COS-7 cells (ATCC CRL-1651) with anti-V5-TAG mouse monoclonal antibody MCA1360P (Serotec, Oxford, UK).

[0231] Recombinant Canarypox Virus (vCP) shuttle vectors were prepared by cloningTp1Tag, Tp2Tag, Tp4Tag, Tp5Tag and Tp8Tag PCR fragments into a pC5H6p donor plasmid to form pC5H6p-Tp1Tag, pC5H6p-Tp2Tag, pC5H6p-Tp4Tag, pC5H6p-Tp5Tag, pC5H6p-Tp8Tag. Primary chicken embryo fibroblasts (CEF) were infected with wild-type canarypox virus (ALVAC strain) and transfected with pC5H6p-TpTag plasmids. Positive plaques were selected on the basis of hybridization with an HRP-labeled probe specific to the Tp sequence. These plaques underwent 2-4 successive selection/purification cycles until a pure population was isolated. A representative plaque corresponding to in vitro recombination between the donor plasmid and the genome of the ALVAC canarypox virus was then amplified and the recombinant virus stock obtained was designated vCPTp1Tag, vCPTp2Tag, vCPTp4Tag, vCPTp5Tag, and vCPTp8Tag, respectively.

[0232] Expression of Tp antigens was confirmed by immunostaining of viral plaques with anti-V5-TAG mouse monoclonal antibody. Virus stocks were prepared by infecting CEFs and titrated by plaque assay on CEF cells and stored at −80° Celsius. All vaccine constructs were screened for the existence of mycoplasma using a Mycoplasma Detection Kit Version 2.0 (ATCC) and bovine viral diarrhea virus (BVDV) by RT-PCR. Endotoxin concentrations in plasmid DNA preparations were measured using the QCL-1000 kit (BioWhittaker, Inc., Walkersville, Md., USA). Plasmid DNA was considered endotoxin-free if endotoxin was less than 100 EU/mg DNA.

[0233] A representative plaque corresponding to in vivo recombination between the donor plasmid and the genome of the ALVAC canarypox virus was then amplified to provide a recombinant virus stock. Specific cloning protocols and the resulting ALVAC clones are described in Examples 5-11 below.

[0234] Expression vector constructs using ALVAC as the vector are presented in Table 3 below.

TABLE 3

| Construct | |
|---|---|
| Vector-insert | Designation |
| ALVAC-Tp1 | vCP2112 |
| ALVAC-Tp1-tag | vCP2163 |
| ALVAC-Tp2 | vCP2110 |
| ALVAC-Tp3-tag | vCP2043 |
| ALVAC-Tp4-tag | vCP2164 |
| ALVAC-Tp5-tag | vCP2138 |
| ALVAC-Tp6-tag | vCP2137 |
| ALVAC-Tp8-tag | vCP2179 |

### EXAMPLE 5

### Construction of ALVAC Tp1, vCP2112

[0235] Plasmid construction: Plasmid pTargetTp1 contained theTp1 gene nucleotide sequence (SEQ ID NO: 1) from Theileria parva strain Muguga. There were five differences between the sequence as provided by The Institute for Genomic Research (TIGR) (identified by BLAST search) and the sequence of the p Target Tp1 template (SEQ ID NO: 1) as shown in FIG. 1. Four of these differences result in changed amino acids and one difference is silent.

[0236] Plasmid p Target Tp1 was used to generate a C5 donor plasmid pC5 H6pTp1 (pSL-6174-1-1) containing the Theileria parva Tp1 gene. In pSL-6174-1-1, the plasmid backbone was pCXL-148-2 (pC5 ALVAC H6p) with theTp1 coding sequence SEQ ID NO: 1 between the EcoR V and Xho I sites, the vaccinia virus H6 promoter and the ampR gene. The plasmid construction is schematically illustrated in FIG. 2. PCR amplification of the 5′-Tp1 gene used pTargetTp1 plasmid as the template and primers 8452.SL (SEQ ID NO: 2) and 8455.SL (SEQ ID NO: 5) illustrated in FIG. 3. Primer 8452.SL (SEQ ID NO: 2) included the 3′-end of the H6 promoter, and primer 8455.SL (SEQ ID NO: 5) included a 3′-Kpn I site for later cloning. The resultant 0.8 kb PCR fragment was cloned into vector pCR2.1 to generate pSL-6089-1-1 (see FIG. 2), which had the correct sequence of the H6p promoterTp1, but with the desired Kpn I site not in the desired location.

[0237] PCR amplification of 3′-Tp1 used pTargetTp1 as template and primers 8453.SL (SEQ ID NO: 3) and 8454.SL (SEQ ID NO: 4) illustrated FIG. 3. Primer 8454.SL (SEQ ID NO: 4) introduced a 5′-KpnI site for later cloning and primer 8453.SL (SEQ ID NO: 3) introduced a stop signal, T5NT transcription terminator, and an Xho I site for cloning. The approximately 0.8 kb fragment was then cloned into pCR2.1, generating pSL-6104-1-1 (FIG. 2). The fragments from pSL-6089-1-1 and pSL-6104-1-1, however, could not be joined due to the misplaced Kpn I site in pSL-6089-1-1.

[0238] PCR amplification ofTp1 used pTargetTp1 as template and primers 8452.SL (SEQ ID NO: 2) and 8453.SL (SEQ ID NO: 3). The resultant approximately 1.6 kb fragment was cloned into pCR2.1, generating pSL-6126-1-1, which did not contain the promoter sequence and had a PCR error at the 3′-end.

[0239] The PCR-based error in pSL-6126-1-1 was corrected by replacing the 0.6 kb Mfe I/xho I fragment with the corresponding fragment from pSL-6104-1-1, resulting in pSL-6164-1-1. This plasmid contained the correctTp1 sequence, but had no H6 promoter.

[0240] pCXL-148-2 is a C5 donor plasmid containing the H6 promoter. The 0.4 kb EcoR V-Bgl II fragment from pSL-6089-1-1 and the 1.2 kb Bgl II/Xho I fragment from pSL-6164-1-1 were ligated with the 4.9 kb EcoR V/Xho I vector fragment from pCXL-148-2 to generate pSL-6174-1-1 as shown in FIG. 4. The positions of the various regions of the 6.513 kb pSL-6174-1-1 sequence (SEQ ID NO: 6, as shown in FIG. 5) are: C5R: nucleotides 236-1809; H6p: nucleotides 1881-2004; Tp1: nucleotides 2005-3633; C5L: nucleotides 3696-4105; and ampR: 4712-5569. The predicted amino acid sequence of the product ofTp1 (SEQ ID NO: 7) is shown in FIG. 6A.

[0241] Preparation of a Tp1-specific probe: Primers for amplifying a Tp1-specific probe were: 8456.SL: 5′-ACTCACACACTGCTGGGCATAAAGTT-3′ (SEQ ID NO: 8); 8459.SL: 5′-GAACGTCTAGAAAGGTTTACTGTCAC-3′ (SEQ ID NO: 9) and primers for PCR amplification of the vCP2112 C5 arms plus insert were: 7931.DC: 5′-GAATCTGTTAGTTAGTTACTTGGAT-3′ (SEQ ID NO: 10) and 7932.DC 5′-TGATTATAGCTATTATCACAGACTC-3′ (SEQ ID NO: 11).

[0242] Cells for in vivo recombination: Primary chicken embryo fibroblast cells (CEFs) were grown in 10% fetal bovine serum (JRH: γ-irradiated cat # 12107 Lot# ON0469, 1L0232), DMEM (BRL/Gibco Cat #11960) supplemented with 4 mM glutamine (BRL/Gibco Cat #25030-081), 1 mM sodium pyruvate (BRL/Gibco Cat #11360-070) and 1×antibiotics/antimycotics (P/S/A/A, BRL/Gibco Cat #15240-062).

[0243] Recombinant generation: In vivo recombination, shown schematically in FIG. 7, was performed by transfecting primary CEF cells with Not I-linearized donor plasmid pSL-6174-1-1 (15 μg) using Fugene reagent (Roche). The transfected cells were subsequently infected with ALVAC as the rescue virus at a MOI of 10 (stock virus of 1.2×10¹⁰ pfu/ml). After 24 hrs, the transfected/infected cells were harvested, sonicated and used for recombinant virus screening. Recombinant plaques were screened by plaque lift hybridization using the Tp1-specific probe, prepared as described above, and labeled with horseradish peroxidase according to the manufacturer's protocol (Amersham Cat# RPN3001). After four sequential rounds of plaque purification, the recombinants designated as vCP2112.7.2.1.3 and vCP2112.8.1.1.1 respectively were isolated and confirmed by hybridization as having theTp1 insert and negative for the C5 ORF. Single plaques of both isolateswere selected from the fourth round of plaque purification, and expanded to obtain P1 (T-25 flask), P2 (T75 flask) and P3 (roller bottle) stocks.

[0244] The infected cell culture fluids from the roller bottles were harvested and concentrated to produce virus stocks (2.2 ml of vCP2112.7.2.1.3 at 9.8×10⁹ pfu/ml and 2.2 ml of vCP2112.8.1.1.1 at 1.1×10¹⁰ pfu/ml).

[0245] Sequence analysis: Analysis of viral stock genomic DNA was performed by PCR amplification and sequence analysis of the flanking arms of the C5 locus and the Tp1 insert. Primers 7931.DC 5′-GAATCTGTTAGTTAGTTACTTGGAT-3′ (SEQ ID NO: 10) and 7932.DC 5′-TGATTATAGCTATTATCACAGACTC-3′ (SEQ ID NO: 11) located beyond the arms of the C5 locus in the donor plasmid were used to amplify the entire C5R-Tp1 insert-C5L fragment. The nucleotide sequence SEQ ID NO: 12, and the sequence of the complementary strand thereof, of the recombinant ALVAC-Tp1 construct and the various domains therein is illustrated in FIG. 8.

### EXAMPLE 6

### Generation of ALVAC Recombinant Tp2, vCP2110

[0246] Plasmid construction: The Tp2 gene was PCR amplified using pTarget Tp2 as the template and primers 8450.SL (SEQ ID NO: 13) and 8451.SL (SEQ ID NO: 14), shown in FIG. 3, which introduced the 3′-end of the H6 promoter and the T5NT pox virus transcription termination signals respectively. The amplified fragment was cloned, as shown schematically in FIG. 9, into vector pCR2.1 and clone pSL-6104-5 was confirmed by sequence analysis. Plasmid pCXL-148-2 was digested with EcoR V and Xba I and ligated with the 0.6 kb EcoR V/Xba I fragment from pSL-6104-5. Clone pSL-6151-2, the map of which is shown in FIG. 10, was confirmed by sequence analysis of the C5 arms, H6 promoter and Tp2 insert. Within the nucleotide sequence of plasmid pSL-6151-2 (SEQ ID NO: 15 shown in FIG. 11), the nucleotide positions of identifiable regions are: C5R, 236-1809; C5L, 2582-2991; H6p, 1881-2004; Tp2, 2005-2526. The predicted amino acid sequence (SEQ ID NO: 16) of the Tp2 gene is shown in FIG. 6B.

[0247] Recombinant generation: In vivo recombination was performed as described in Example 1 above and as shown schematically in FIG. 12. After 4 sequential rounds of plaque purification, recombinants designated vCP2110.1.1.1.1 and vCP2110.12.2.1.2 were isolated. Single plaques from the 4th round of plaque purification were expanded to obtain P1 (60 mm), P2 (T75 flask) and P3 (roller bottle) stocks to amplify vCP2110. Recombinants were re-confirmed at the P2 level by hybridization as positive for the insert and negative for the C5 ORF. The infected cell culture fluid from the roller bottles was harvested and concentrated to produce virus stock (2.25 ml of vCP2110.1.1.1.1 at 1.5×10¹⁰ pfu/ml and 2.25 ml of vCP2110.12.2.1.2 at 1.7×10¹⁰ pfu/ml).

[0248] Analysis of the vCP2110 genomic DNA was performed by PCR amplification and sequence analysis of the flanking arms of the C5 locus and the Tp2 insert. Primers 7931.DC 5′-GAATCTGTTAGTTAGTTACTTGGAT-3′ (SEQ ID NO: 10) and 7932.DC 5′-TGATTATAGCTATTATCACAGACTC-3′ (SEQ ID NO: 11) were used to amplify the entire C5R-H6p Tp2-C5L fragment. The results showed that the sequences of the H6p Tp2 insert and the C5 left and right arms around the H6p Tp2 insert (SEQ ID NO: 17 as shown in FIG. 15) in the ALVAC vector were as expected, with the nucleotide positions therein as follows: Tp2, 1883-2404; Probe, 1853-2302; C5R, 126-1661; C5L, 2459-2863; H6 promoter, 1759-1882.

[0249] Primers for amplifying the Tp2-specific probe were 8565.DT: 5′ ACTTGTTTTCCCAATGCATTCCAG 3′ (SEQ ID NO: 18) and 8450.SL (SEQ ID NO: 13).

### EXAMPLE 7

### Construction of ALVAC Tp3, vCP2143

[0250] Plasmid construction: The insert of plasmid pSG Tp3-tag#5 encodes the T. parva gene Tp3 and a marker tag from the circumsporozoite protein of Plasmodium berghei and has the nucleotide sequence SEQ ID NO: 19 as shown in FIG. 16 was used. Within theTp1 coding sequence, one internal T5NT at the 5′ end of gene was removed by site directed mutagenesis (TTTTTGT→TTCCTGT). Two silent mutations relative to the TIGR sequence were found. This target plasmid was used to generate a C5 donor plasmid pC5 H6pTp1 (pSL-6174-1-1) containing the Theileria parva Tp3 gene. In pSL-6174-1-1, the plasmid backbone was pCXL-148-2 (pC5 ALVAC H6p) having the insertion of Tp3 between the EcoR V and Xho I sites, the vaccinia virus H6 promoter and the ampR gene,

[0251] The plasmid construction is schematically illustrated in FIG. 17. PCR amplification was performed using pSG Tp3-tag as template and primers 8648.SL (SEQ ID NO: 20, FIG. 3) and 8647.SL (SEQ IDS NO: 21, FIG. 3). The approximately 800 bp PCR fragment was cloned into pCR2.1, generating plasmid pCXL814.6 (pCR2.1 H6p Tp3-tag). Site-directed mutagenesis using pCXL814.6 as the template and primers 8654.SL: 5′-ATCGCAATAGCCTTCCTGTATTCCTGTTTC-3′ (SEQ ID NO: 22) and 8660.SL: 5′-GAAACAGGAATACAGGAAGGCTATTGCGAT-3′ (SEQ ID NO: 23). The approximately 0.6 kb Nru I-Xba I fragment from pCXL827.1 was inserted into the ALVAC C5 donor plasmid pCXL-148-2 that had been digested with Nru I/Xba I, to generate plasmid pCXL853.2 (pC5H6 Tp3-tag) having the sequence SEQ ID NO: 24 as shown in FIG. 18. Regions within the plasmid pC5H6 Tp3-tag were located at the following nucleotide positions within SEQ ID NO: 24: Amp resistance, 3928-4788; C5R, 248-1783; C5L, 2911-3315; H6, 1881-2004; Tp3 tag, 2005-2859Recombinant generation: The in vivo recombination was performed by transfecting primary CEFs grown as described in Example 1 above, with 9.6 μg of Not I-linearized donor plasmid pCXL853.2 and as schematically illustrated in FIG. 19. The transfected cells were subsequently infected with ALVAC as the rescue virus at a multiplicity of infection (MOI) of 10. After 29 hrs, the transfected-infected cells were harvested, sonicated and used for recombinant virus screening.

[0252] Recombinant plaques were screened by plaque lift hybridization method using a 487 bp Tp3 tag specific probe labeled with horseradish peroxidase. After five sequential rounds of plaque purification, the recombinants vCP2143.2.1.1.1.1 and vCP2143.4.1.1.1.1 were obtained and confirmed by hybridization as positive for the Tp3 tag insert and negative for the C5 ORF. Single plaques were selected from fifth round of plaque purification, and expanded to obtain stocks to amplify construct vCP2143.

[0253] The infected cell culture fluid from P3 roller bottles was harvested and concentrated to produce virus stock (1.8 ml at 3.4×10¹⁰ pfu/ml and 1.8 ml at 2.×10¹⁰ pfu/ml respectively, for vCP2143.2.1.1.1.1 and vCP2143.4.1.1.1.1.).

[0254] Sequence analysis: Analysis of viral vCP2143 stock genomic DNA was by PCR amplification and sequence analysis of the flanking arms of the C5 locus and the Tp3-tag insert. Primers 7931.DC (SEQ ID NO: 10) and 7932.DC 5′ (SEQ ID NO: 11) were used to amplify the entire C5L-Tp3 TAG-C5R fragment. The nucleotide sequence of ALVAC vCP2143 (SEQ ID NO: 25) is shown in FIG. 20. In vCP2143 (SEQ ID NO: 25), the various regions are at the following nucleotide positions: Tp3 tag, 1883-2737; Probe, 2251-2737; C5R, 126-1661; C5L, 2789-3193; Primer 7931DC, 1-25; Primer 8649SL, 2251-2274; Primer 8651SL, 2714-2737 (on complementary strand); primer 7932DC, 3284-3308 (on complementary strand); promoter H6, 1759-1882. The amino acid sequence SEQ ID NO: 26 of the encoded Tp3 region is shown in FIG. 6.

[0255] Expression analysis: Primary CEFs were infected with P3 viral stock at a MOI of 10 and incubated at 37° C. for 27 hrs. The cells and culture supernatant were harvested and extracted sample proteins were separated on a 10% SDS-PAGE gel, transferred to Immobilon nylon membrane, and probed with an anti-V5-TAG-specific mAb (Serotech MCA1360 at 1 in 2,000 dilution). Peroxidase-conjugated goat anti-mouse antiserum was used as secondary antibody and the bands were visualized using luminol reagents.

### EXAMPLE 8

### Construction of ALVAC Vector Encoding Tp4

[0256] Plasmid construction: Plasmid pcDNA3-Tp4 was used to construct a donor plasmid for insertion of H6p Tp4, with an expression tag, into the C5 loci of ALVAC as shown schematically in FIG. 21. A PCR reaction was performed using pcDNA3-Tp4 as template with primers 11289.SL (SEQ ID NO: 27, FIG. 3) and 11290.SL (SEQ ID NO: 28, FIG. 3). These primers introduced the 3′-end of the H6 promoter and a 3′-Xho I site for linking to the P. berghei tag sequence. The PCR product was cloned into pCR2.1 to generate plasmid pSL-6507-3-1 (pCR2.1 Tp4).

[0257] Plasmid pSL-6439-2 (pC5 H6p Tp5-tag) was used as the source of pC5 vector backbone, the 5′-end of H6p and the P. berghei tag sequence. Plasmid pSL-6439-2 was digested with Nru I and Xho I and ligated with the 1.8 kb Nru I/Xho I Tp4 fragment from pSL-6507-3-1, to generate pSL-6555-2-1 (pC5 H6p Tp4-tag), the nucleotide sequence of the insert of which (SEQ ID NO: 29) shown in FIG. 22. Nucleotide positions within pSL-6555-2-1 of various regions are as follows: C5R, 236-1809; H6p, 1881-2004; Tp4, 2005-3741; tag, 3742-3801; C5L, 3854-4263; AmpR, 4870-5727. The amino acid sequence (SEQ ID NO: 30) of the Tp4-tag product is shown in FIG. 6D.

### EXAMPLE 9

### Construction of ALVAC vCP2138 Encoding TP5

[0258] Plasmid construction: Plasmid pSG Tp5-tag #9 encoding: T. parva gene 5 with a marker tag from the circumsporozoite protein of Plasmodium berghei was used to construct a donor plasmid for insertion of Tp5-tag into the C5 loci of ALVAC according to the scheme illustrated in FIG. 23.

[0259] PCR amplification was performed using pSG Tp5-tag as the template and the primers 8648.SL (SEQ ID NO: 20, FIG. 3) and 8652.SL (SEQ ID NO: 31, FIG. 3). The approximately 600 bp PCR fragment was cloned into pCR2.1, generating plasmid pSL-6413-1-2 (pCR2.1 H6p Tp5-tag) which was sequenced. The approximately 0.6 kb Nru I-Xba I fragment from pSL-6413-1-2 was inserted into the ALVAC C5 donor plasmid pCXL-148-2, which had been digested with Nru I/Xba I, to generate plasmid pSL-6439-2. The amino acid sequence of the Tp5-tag product (SEQ ID NO: 32) is illustrated in FIG. 6E. The nucleotide sequence of the insert of construct pSL-6439-2 (SEQ ID NO: 33) is illustrated in FIG. 24.

[0260] Generation and characterization of Canary pox recombinant containing Tp5-tag inserted in C5 loci of ALVAC (vCP2138): In vivo recombination according to the schematic illustrated in FIG. 25 was performed by transfection of primary CEFs with Not I-linearized donor plasmid pSL-6439-2 (15 μg). The transfected cells were subsequently infected with ALVAC-1 as the rescue virus at an MOI of 10 (Stock date # 1387). After 24 hrs, the transfected-infected cells were harvested, sonicated and used for recombinant virus screening.

[0261] Recombinant plaques were screened by plaque lift hybridization method using a Tp5-tag-specific probe (prepared using the primers 8651.SL: 5′-GTCTAGTCCTAGCAAAGGGTTAGG-3′ (SEQ ID NO: 34) and 8653.SL: 5-GCTCGGTAATGGCAGACTTGAAGC-3′ (SEQ ID NO: 35) labeled with horseradish peroxidase. After 6 and 7 sequential rounds of plaque purification, the recombinants vCP2138.16.2.2.1.2.4.6 and vCP2138.19.2.2.1.1.1 were isolated and confirmed by hybridization as positive for the Tp5-tag insert and negative for the C5 ORF.

[0262] Single plaques were selected from the sixth and seventh rounds of plaque purification, were expanded to obtain P1, P2, and P3 (roller bottle) stocks to amplify vCP2138. The infected cell culture fluid from the roller bottles was harvested and concentrated to produce virus stock (2.1 ml of vCP2138.19.2.2.1.1.1 at 2.7×10¹⁰ pfu/mL and 2.1 ml of vCP2138.16.2.2.1.2.4.6 at 2.2×10¹⁰ pfu/mL).

[0263] Sequence analysis: A more detailed analysis of the P3 viral stock genomic DNA was performed by PCR amplification and sequence analysis of the flanking arms of the C5 locus and the Tp5-tag insert. Primers 7931.DC (SEQ ID NO: 10) and 7932.DC (SEQ ID NO: 11) were used to amplify the entire C5R-H6p Tp5-tag-C5L insert fragment, the nucleotide sequence (SEQ ID NO: 36) of which is shown in FIG. 26. The nucleotide positions of the various domains within sequence SEQ ID NO: 36 are as follows: Tp5-tag, 1883-2407; Tp5-specific probe, 2005-2407; C5R, 126-1661; C5L, 2459-2863; H6 promoter, 1759-1882. The vector vCP2138, therefore, comprised the 4016 bp insert SEQ ID NO: 36 and the ALVAC sequences for a total length of 327756 bp.

### EXAMPLE 10

### Construction of pC5 H6p Tp6-tag (pHM1103.1) Donor Plasmid

[0264] Plasmid construction: The Tp6-tag gene was amplified from the pSG Tp6 tag#6 template using primers 8648.SL (SEQ ID NO: 20, FIG. 3) and 8655.SL (SEQ ID NO: 37, FIG. 3), which introduce the 3′-end of the H6 promoter and the T5NT poxvirus transcription termination signals. As shown in the schematic illustrated in FIG. 27, using the TA TOPO® cloning system (Invitrogen, Inc), the PCR product was cloned into pCR 2.1-TOPO. Clone pCR2.1 Tp6.1 (CXL798) was confirmed by sequence analysis except for a single base pair change of a C to a T at base pair 2064 resulting in a silent mutation at amino acid 20 (leucine). Plasmid pCR2.1 Tp6.1 was digested with Nru I and Xba I and the 0.9 Kb fragment containing the 3′ end of the H6p and the Tp6-tag gene was inserted into pCXL-148-2 that had been digested with Nru I and Xba I to generate pHM1103.1 (pC5 H6p Tp6-tag). Regions within the insert nucleotide sequence SEQ ID NO: 38 of the pHM1103 plasmid, illustrated in FIG. 28, are: Tp6 Tag, 2005-2895; Tag, 2836-2895; C5R, 236-1809; C5L, 2948-3357; H6p, 1881-2004. The amino acid sequence (SEQ ID NO: 39) of the Tp6 product encoded by this plasmid is shown in FIG. 6F. The nucleotide sequence of the entire pHM1103 plasmid (SEQ ID NO: 40) is illustrated in FIG. 29.

### EXAMPLE 11

### Generation and Characterization of Canary Pox Recombinant Encoding Tp8-tag Inserted in C5 Loci of ALVAC (vCP2179).

[0265] Recombinant generation: In vivo recombination, according to the schematic shown in FIG. 30, was performed by transfecting primary CEFs with 20 μg of Not I-linearized donor plasmid pCXL1055.2 having the Tp8 tag insert using FuGENE-6® reagent (Roche). The transfected cells were subsequently infected with ALVAC as rescue virus at an MOI of 10. After 30.5 hrs, the transfected-infected cells were harvested, sonicated and used for recombinant virus screening.

[0266] Recombinant plaques were screened by plaque lift hybridization method using a 923 bp Tp8-tag-specific probe amplified using the primers 11360SL: 5′-GTTCTTTACAAGGTTGCAGTCGAG-3′ (SEQ ID NO: 41) and 11362SL: 5′-GACTCGAGAACTGCGTACACTGCGAAGGAGGT 3′ (SEQ ID NO: 42) labeled with horse radish peroxidase. After four sequential rounds of plaque purification, recombinants vCP2179.1.1.1.2 and vCP2179.2.1.1.1 were isolated and confirmed by hybridization as positive for the Tp8-tag insert and negative for the C5 ORF.

[0267] Single plaques were selected from fourth round of plaque purification, and expanded to obtain P1, P2 and P3 (4× roller bottles per sister construct in the first batch, then 8 roller bottles for vCP2179.2.1.1.1 in the second batch) stocks to amplify construct vCP2179. The infected cell culture fluid from the roller bottles was harvested and concentrated to produce virus stock. Titers of the concentrated stocks were: (first batch) vCP2179.1.1.1.2, 2.7×10⁹ pfu/ml in 2.7 ml; vCP2179.2.1.1.1, 5.4×10⁸ pfu/ml in 2.7 ml; (second batch) vCP2179.2.1.1.1, 3.6×10⁹ pfu/ml in 5.0 ml.

[0268] Sequence analysis: Analysis of the P3 stock genomic DNA was performed by PCR amplification and sequence analysis of the flanking arms of the C5 locus and the Tp8-tag insert. Primers 7931DC (SEQ ID NO: 10 and 7932DC (SEQ ID NO: 11) located beyond the arms of the C5 locus and within the ALVAC genome were used to amplify the entire C5L-Tp8-tag-C5R insert fragment, which was then sequenced. The nucleotide sequence SEQ ID NO: 43 of the amplified insert is shown in FIG. 31. Within SEQ ID NO: 43 the various regions are located at nucleotide positions as follows: Tp8, 1883-3202; Tag, 3203-3262; Tp8-specific probe, 2288-3210; C5L, 126-1661; C5R, 3314-3718; Primer 7931DC, 1-25; Primer 11360, 2288-2311; Primer 11362, 3179-3210 (on complementary strand); Primer 7932DC, 3809-3833 (on complementary strand); promoter H6p, 1759-1882. The amino acid sequence SEQ ID NO: 44 of the Tp8 polypeptide encoded by the cloned insert is shown in FIG. 6G.

### EXAMPLE 12

### Vaccine Construct Expression Data

[0269] The expression vector constructs vCP2179, ALVAC-Tp8-tag and vFP2201 TROVAC-Tp2-tag were expressed in primary chicken embryo fibroblasts (CEFs).

[0270] FIG. 18 illustrates an immunoblot analysis of the products expressed from vCP2179, ALVAC-Tp8-tag. FIG. 19 illustrates an immunoblot analysis of the products expressed from vFP2201 TROVAC-Tp2-tag and a comparison with the products expressed from vCP2143 ALVAC-Tp3-tag.

### EXAMPLE 13

### Infection and Treatment Immunization of Cattle and CTL

[0271] Fourteen cattle, 3 Boran (Bos indicus), 2 Jersey (Bos taurus), 2 Friesian (do.) and 7 crossbreds, were immunized by the infection and treatment method against the Muguga stock of T. parva by simultaneous inoculation of sporozoites (1:20 dilution of sporozoite stabilate # 4133, ILRI, Nairobi, Kenya) and long-acting oxytetracycline at 20 mg/kg body weight as described by Taracha et al., (1996) Infect. Immun. 63: 1258. Cattle were challenged with 1:20 dilution of sporozoite stabilate several months after immunization. Following immunization or challenge, animals were monitored for clinical and parasitological changes. Giemsa-stained biopsy smears were examined for the presence of schizont-infected cells and scored on a scale of 0-3. Prior to immunization, venous blood was collected from animals, peripheral blood mononuclearcytes (PBMCs), purified and infected in vitro with T. parva (Muguga) sporozoites as described by Goddeeris & Morrison, (1988) J. T. Cult. Methods. 11: 101. Infected lymphoblasts were maintained in RPMI-1640 supplemented with 10% Fetalclone II (Perbio Science UK, Ltd. Cramlington, UK; tested for BVDV & Mycoplasma spp.), 100 iU/ml penicillin, 100 μg/ml streptomycin, 50 μg/ml gentamycin, 5×10⁻⁵M 2-mercaptoethanol and 2mM L-glutamine and passaged 1:5 three times a week as established T. parva-infected lymphoblasts. Schizont-specific polyclonal CTL lines and clones were established from PBMC obtained from immunized animals by repeated restimulation with autologous infected lymphoblasts, maintained and assessed for cytotoxic activity as previously described by Goddeeris & Morrison, (1988) J. T. Cult. Methods. 11: 101.

### EXAMPLE 14

### Generation, Immortalization and Transfection of Bovine Skin Fibroblasts

[0272] Skin biopsies were surgically collected and skin fibroblasts (SFs) prepared using standard protocols. Skin fibroblasts (SF) were maintained in DMEM containing 10% FBS (Perbio Science), 100 iU/ml penicillin, 100 μg/ml streptomycin and 2 mM L-glutamine and immortalized by the stable integration of the gene encoding the SV40 large T antigen. Sub-confluent SF monolayers were transfected with pSV3-neo (ATCC code 37150, ATCC, Rockville MD, USA) using Fugene 6 transfection reagent as described by the manufacturer (Roche Diagnostics GmbH, Mannheim, Germany). Two hrs post-transfection, medium was removed and replaced with DMEM containing 10% FCS and 0.5 μg/ml of geneticin (Sigma) and incubated further. Cells were maintained under selection, positive colonies were expanded and expression of SV40 large T-antigen was assessed using immunoperoxidase staining (SV40 T Ag (Ab-2), Oncogene Research Products, San Diego, Calif., USA). Further expansion and maintenance of SFs was carried out using complete DMEM. Immortalized SFs (iSFs) were dispensed, 2×10⁵/well, 96 well flat-bottom plates, incubated overnight and transfected with plasmids expressing targeted genes or schizont cDNA pools (100 ng/well) using Fugene 6 transfection reagent. COS-7 cells were co-transfected with 100 ng/well of each targeted gene or schizont cDNA pool together with 50 ng/well BoLA cDNA.

### EXAMPLE 15

### Detection of CTL Recognition of Transfected iSF by IFN-γ ELISpot

[0273] Twenty-four hours post-transfection, transfected iSF were washed with PBS (200 μl/well), detached with 100 μl/well 0.25% Trypsin-EDTA and transferred to 96 well round-bottom plates (Costar) containing 100 μl/well cold RPMI supplemented with 10% FCS. Cells were centrifuged at 1200 rpm for 3 min, supernatant removed and cells resuspended in 100 μl of RPMI-1640 supplemented as described above. Schizont-specific CTL, generated and maintained as described above, were harvested 7-14 days post-stimulation, and resuspended at 2×10⁵/ml in RPMI-1640 medium supplemented with 10% FBS and 5 U/ml recombinant human IL-2 (Sigma). ELISpot plates (Millipore Corporation, Bedford, Mass., USA) were coated with 50 μl/well of 1 μg/ml of murine anti-bovine IFN-γ monoclonal antibody (CC302; Serotec, Oxford, UK) and incubated overnight at 4° Celsius. Wells were washed twice with unsupplemented RPMI-1640 and blocked using 200 μl/well with RPMI-1640 supplemented with 10% FBS by incubating at 37° Celsius for 2 hours. The blocking medium was removed, replaced with 50 μl/well CTL and 100 μl/well transfected cells, and incubated in a humidified incubator at 37° Celsius for 20 hrs. After incubation, the contents of wells were removed and wells washed four times with distilled water containing 0.05% Tween 20 with the plate shaken for 30 secs between washes. The process was repeated an additional four times, using PBS containing 0.05% Tween 20. Plates were then developed for IFN-γ spots and read as described in Taracha et al., (2003) Infect. Immun. 71: 6906

### EXAMPLE 16

### Detection of CTL Lysis of Transfected-iSF

[0274] Autologous iSFs were seeded at 2.5×10⁵ cells/well in 6-well plates (Costar) and incubated for 2 hours at 37° Celsius to allow cells to adhere. Cells were transfected using Fugene 6 transfection reagent as described by the manufacturer. Twenty-four hours post-transfection, cells were harvested as described above. Transfected cells and schizont-infected cells were labeled with ⁵¹Chromium (Amersham Biosciences Europe GmbH, Freiburg, Germany) and the ability of schizont-specific CTL lines (day 6-8 post-stimulation) to lyse these targets was assessed as described in Example 15

### EXAMPLE 17

### Ex vivo Detection of Antigen-Specifilc CD8⁺ T Cell Responses

[0275] Cattle donors for schizont-specific CTL used to identify Tp1-8, were challenged with a lethal dose of T. parva (Muguga) sporozoites and bled on selected days post-challenge. CD8⁺ T cells and CD14⁺ monocytes were purified from PBMC by MACS magnetic cell sorting according to the manufacturer's instructions (Miltenyi Biotec, Gergisch Gladbach, Germany). CD8⁺ T cells were sorted indirectly using a monoclonal antibody specific for bovine CD8 (IL-N*001015; ILRI, Nairobi, Kenya) followed by incubation with goat anti-mouse IgG microbeads (Miltenyi Biotec). CD14⁺ monocytes were sorted directly by incubation with CD14 microbeads (Miltenyi Biotec). CD8⁺ T cells (2.5×10⁵ /well) and CD14⁺ monocytes (2.5×10⁴/well) were added to IFN-γ ELISpot plates containing synthetic peptides (1 μg/ml final concentration) and were incubated and developed as described above.
[0276] FIG. 40 illustrates summed CD8+ T cell IFN-g responses following MVA/CP immunization.
[0277] FIG. 41 illustrates summed CD8+ T cell IFN-g responses following CP/MVA immunization.

### EXAMPLE 18

### Theileria parva Vaccination/Challenge

[0278] Twenty-eight Boran (Bos indicus), Friesian (Bos taurus), and crossbred calves, 4-24 months old and expressing one of four MHC class I alleles were randomized into three groups as shown in Table 4.

TABLE 4
Cattle and their responses to heterologous prime-boost immunization with CTL target
antigens and challenge with T. parva.

| | | | | | | CD8⁺ | | |
|---|---|---|---|---|---|---|---|---|
| | | | | | BoLA | T cell | | ECF |
| Group | Animal No | Breed | Sex | Age (mo) | allele | IFN-γ | CTL | Index |
| CP/ | BX215 | Boran | Female | 22.33 | N*00101 | + | − | 4.63 |
| MVA | BZ027 | Friesian | Male | 8.26 | N*01301 | + | + | 6.31 |
| | BZ017 | Friesian | Male | 6.36 | T5* | + | + | 7.26 |
| | BY142 | Crossbred | Female | 8.69 | T2a | − | − | 7.42 |
| | BY206 | Crossbred | Female | 13.51 | T2a | + | + | 7.45 |
| | BZ039 | Friesian | Female | 15.67 | N*01301 | + | + | 7.85 |
| | BX223 | Boran | Male | 24.89 | N*00101 | + | − | 7.97 |
| | BX216 | Boran | Male | 21.93 | N*00101 | + | − | 8.45 |
| | BZ026 | Friesian | Male | 9.74 | T2a | − | − | 8.64 |
| | BZ016 | Friesian | Male | 6.36 | T5 | + | − | 8.70 |
| | BZ018 | Friesian | Male | 4.33 | N*01301 | + | − | 8.93 |
| | BZ022 | Friesian | Male | 10.03 | T5 | + | − | 8.93 |
| DNA/ | BY001 | Crossbred | Male | 15.93 | T2a | + | + | 3.39 |
| MVA | BX219 | Boran | Male | 24.69 | N*00101 | + | + | 6.28 |
| | BZ023 | Friesian | Male | 7.02 | N*01301 | + | + | 6.96 |
| | BY138 | Friesian | Male | 20.45 | T2a | − | − | 7.09 |
| | BZ013 | Friesian | Male | 18.39 | T5 | + | − | 7.28 |
| | BX225 | Boran | Male | 21.87 | N*00101 | + | − | 7.61 |
| | BX220 | Boran | Female | 22.23 | N*00101 | − | − | 8.44 |
| | BZ019 | Friesian | Male | 4.20 | T5 | + | − | 8.59 |
| | BZ020 | Friesian | Male | 12.07 | T2a | − | − | 8.60 |
| | BY100 | Crossbred | Male | 10.92 | N*01301 | + | − | 8.78 |
| | BZ025 | Friesian | Male | 9.64 | T5 | + | − | 8.83 |
| | BZ040 | Friesian | Female | 7.34 | N*01301 | + | − | 8.91 |
| Control | BY029 | Crossbred | Male | 13.05 | T2a | − | − | 7.88 |
| | BY071 | Friesian | Male | 26.82 | T5 | − | − | 8.50 |
| | BZ038 | Friesian | Female | 16.69 | N*01301 | − | − | 8.76 |
| | BX218 | Boran | Female | 24.82 | N*00101 | − | − | 8.90 |

[0279] Ages of cattle at the time of priming immunization are shown. Cattle were defined as CD8⁺ T cell IFN-γ and CTL responders (+) or non-responders (−). DPC , Days post-challenge

[0280] Recombinant DNA, CP and MVA constructs expressing single antigens (Tp1, Tp2, Tp4, Tp5 and Tp8) were prepared separately and inoculated at different sites. Cattle were primed with 0.5 mg of each recombinant DNA plasmid by intradermal injection or 1×10⁸ pfu of each recombinant canarypox virus by subcutaneous injection given at different sites. After four weeks, cattle were inoculated with 5×10⁸ pfu of each recombinant MVA construct by subcutaneous injection. Three weeks post-boost, cattle were challenged with a lethal dose of T parva (1:20 dilution of T. parva Muguga stock sporozoite stabilate # 4133, ILRI, Nairobi, Kenya) and the response to challenge monitored as described above. Reactions to challenge were calculated as an ECF reaction index by combination of thirteen parameters, including temperature, hematological and parasitological measurements, using a first principle component analysis as described in Rowlands et al., Parasitol. (2000) 120: 371.

[0281] Cattle were assessed daily by an independent veterinarian and animals displaying clinical signs of severe ECF were euthanized and the experiment was terminated 21 days post-challenge. Antigen-specific CD4⁺ and CD8⁺ T cell IFN-γ responses were measured by ELISpot assay every 2 weeks over the course of immunization and challenge. CD4⁺ T cells were MACs sorted indirectly using a monoclonal antibody specific for bovine CD4 (IL-A12; ILRI, Nairobi, Kenya), CD8⁺ T cells and CD14⁺ monocytes were sorted as described above and ELISpot assays conducted as described above. Antigen-specific CTL responses were recalled by subjecting PBMC to three rounds of restimulation with T. parva infected cells and cytotoxicity against infected cells and uninfected cells pulsed with antigenic peptides were assayed as described above.

[0282] Nineteen (93%) of the vaccinated cattle exhibited antigen specific CD8⁺ T cell IFN-γ responses as shown in Table 4 and were boosted in all but four animals following sporozoite challenge. CD4⁺ T cell IFN-γ responses were weak and detected in only nine (38%) of the twenty-four vaccinated cattle and there was no evidence of boosting upon sporozoite challenge. PBMCs from the twenty four vaccinated cattle were subjected to three rounds of stimulation with autologous schizont-infected cells and their lytic activity assessed on autologous infected cells and peptide-pulsed lymphoblasts. Prior to challenge, four cattle exhibited lytic activity. At two week post-challenge, the same four cattle and an additional three were positive in the assays. The antigen specificity of the lytic response in the cattle paralleled the specificity of their IFN-γ responses.

[0283] The significance of the lytic CD8⁺ T cell responses became apparent when they were correlated with the outcome to challenge as shown in Table 5 below.

TABLE 5
Association between antigen-specific lytic CTL
responses and outcome to challenge.

| | Vaccinated cattle | | Control cattle |
|---|---|---|---|
| Outcome to | CTL responder | CTL non-responder | CTL non-responder |
| challenge | (n = 7) | (n = 17) | (n = 4) |
| Survived | 7*** | 3 | 1 |
| Euthanized | 0 | 14 | 3 |
| ECF Index | 6.04*** | 8.04 | 8.49 |

***Survival and ECF index of lytic CTL responder cattle were significantly different from non-responders and control cattle (p < 0.01). CTL responses were not detected in the challenge control group.

[0284] All of the challenge controls developed severe ECF, with three animals requiring euthanasia. Of the nineteen cattle that made CD8⁺ T cell IFN-γ responses, nine survived, whereas, all seven cattle that made lytic CD8⁺ T cell responses survived. There was a highly significant association between the ability to mount a lytic response and survival (p<0.001). Most of these cattle suffered moderate to severe ECF as judged by their ECF reaction index, a statistical measurement of disease severity based on clinical and parasitological parameters. Their mean ECF reaction index, however, was lower than that of non-responder and control cattle (p<0.001). Our data suggest that vaccination induced CD8⁺ responses contributed to reducing the severity of disease.

[0285] Analysis of variance (ANOVA) was used for the analysis of fixed effects on different traits using SAS Release 8.2 (SAS Institute Inc., Cary, USA). A Chi-square test was used to compare the differences in survival for CTL responders and non-responders.

### EXAMPLE 19

### Survival of Vaccinated Cattle

[0286] DNA vaccination according to the protocol shown in Table 6 below was performed intramuscularly into subject cattle used 500 μg of each plasmid construct. The amounts of each construct per 500 ml were: ALVAC constructs, 10⁸ pfu; MVA constructs, 5.10⁸ pfu.

TABLE 6

| | | | Challenge |
|---|---|---|---|
| Group | V1 9Day 0) | V2 (Day 28) | (Day 42) |
| A | ALVAC constructs | MVA constructs | Theileria parva |
| | (Tp1, Tp2, Tp4, Tp5, Tp8) | (Tp1, Tp2, Tp3, | |
| | | Tp5, Tp8) | |
| B | DNA Vaccine constructs | MVA constructs | |
| | (Tp1, Tp2, Tp4, Tp5, Tp8) | (Tp1, Tp2, Tp3, | |
| | | Tp5, Tp8) | |
| C | No Vaccine | No Vaccine | |

[0287] The challenge was severe (LD 100). A significant portion of vaccinated cattle survived, and this is the first time such an observation is made after a LD100 challenge.

TABLE 7
Categories of East Coast Fever (ECF) reaction to challenge by delivery systems

| Delivery | | MR/MODR | MODR/SR | MODR/SR | SR | Total | |
|---|---|---|---|---|---|---|---|
| System | No. | (recovered) | (recovered) | (euthanized) | (euthanised) | Protected | Survived |
| vCP/MVA | 12 | 1 | 5 | 1 | 5 | 1 | 6 (50%) |
| DNA/MVA | 12 | 1 | 3 | 2 | 6 | 1 | 4 (33%) |
| Control | 4 | 0 | 1 | 0 | 3 | 0 | 1 (25%) |

### EXAMPLE 20

### Theileria parva 2nd Vaccination/Challenge

[0288] TABLE 8

| | | | Day of death | | | | | | | |
|---|---|---|---|---|---|---|---|---|---|---|
| Group | Total | Alive | 16 | 17 | 18 | 19 | 20 | 21 | 24 | 25 |
| CP/MVA | 21 | 8 | | | 3 | 4 | 2 | 4 | | |
| MVA/CP | 23 | 10 | 1 | 1 | 2 | 3 | 1 | 3 | 1 | 1 |
| PBS | 15 | 7 | 1 | | 2 | 3 | 2 | | | |

[0289] This table describes the number of cattle that died or were euthalized in each group on a given post-challenge day, i.e., the “kinetics” of the mortality after challenge in the vaccinated groups versus the non-vaccinated control group.

### EXAMPLE 21

[0290] Cattle (European and African origins) were randomized on the basis of their BoLA class I type. Vaccines were injected twice intramuscularly using a needle, the injections being 4 weeks apart. The induced immune responses were assessed for each individual antigen using IFNg ELISPOT (on both CD8+ T cells and CD4+ T cells) and determining the stimulating index (on total peripheral blood mononucleocytes). Cattle were challenged with 1×LD₁₀₀ dose of T. parva sporozoïtes

TABLE 9

| | | Cattle representing four BoLA types | | | |
|---|---|---|---|---|---|
| | Imunogen | BoLA- | | | BoLA- |
| | Tp1, Tp2, | A18 | BoLA-T2a | BoLA-A10 | T5 |
| Group | Tp4, Tp5, Tp6 | Tp1 | Tp2 | Tp4 and Tp8 | Tp5 |
| I | vCP/MVA | 3 | 3 | 3 | 3 |
| II | DNA/MVA | 3 | 3 | 3 | 3 |
| III | PBS | 1 | 1 | 1 | 1 |

### EXAMPLE 22

### Individual Kinetics of the IFNg+CD8+ T Cells Response (bovine BX223, ex-vivo stimulating antigen Tp8).

[0291] For each ELISPOT, the negative signal was substrate from the positive signal then a log10 transformation was performed. Each bovine tested was characterized by 3 areas under the curve: a priming area, a boost area, and challenge area as shown, for example, in FIG. 42. This method permitted an increase the performance of the statistical analysis by using repetitive measurement.

[0292] The frequency of IFNγ+CD8+ T cells was shown to be the most discriminative criteria. As a result, only this criterion was selected for the CPA.

### EXAMPLE 23

### Distribution of the BoLA Type Response After Ex Vivo Individual Antigen Stimulation Using PCA.

[0293] The axis 1 is characterized by Tp4 (r=0.88) and Tp8 (r=0.88) variations. The axis 2 is characterized by Tp2 (r=0.76) and Tp5 (r=0.81) variation. The axis 3 is characterized by Tp1 (r=0.89) variation. As predicted and expected and shown in FIG. 43, the antigen-specific response was restricted to the BoLA class I type: A10 (Tp4, Tp8), A18 (Tp1), T5 (Tp5, Tp2). Surprisingly, the distribution of BolA T2a is central and not influenced by the response specific for Tp2.

### EXAMPLE 24

### Protected Cattle Responded, at Least, to One Ag

[0294] All the protected cattle responded, at least, to one Ag (BZ027). Amongst unprotected animals, some responded, whereas some individuals do not. When the vaccine regimens are compared (see, e.g., FIG. 44), based on the intensity of the IFNγ+CD8+ response after boost and challenge, they give similar profiles. The 2 tested vaccine regimens gave similar results based on INFγ+CD8+ responses

[0295] Having thus described in detailed advantageous embodiments of the present invention, it is to be understood that the invention defined by the above paragraphs is not to be limited to particle details set forth in the above description as many apparent variations thereof are possible without departing from the spirit or scope of the present invention.

What is claimed is:

1. An avipox expression vector comprising a polynucleotide encoding a Theileria parva polypeptide.

2. The avipox expression vector of claim 1, wherein the Theileria parva polypeptide is selected from the group consisting of Tp1, Tp2, Tp3, Tp4, Tp5, Tp6, Tp7 and Tp8.

3. The avipox expression vector of claim 1, wherein the Theileria parva polypeptide comprises an amino acid sequence selected from the group consisting of SEQ ID NOs: 7, 16, 26, 30, 32, 39, 44-50 and 60-64, and any fragment thereof.

4. The avipox expression vector of claim 1, wherein the avipox expression vector is an attenuated avipox expression vector.

5. The avipox expression vector of claim 4, wherein the avipox expression vector is a canarypox vector.

6. The canarypox vector of claim 5, wherein the canarypox vector is ALVAC.

7. The avipox expression vector of claim 4 wherein the avipox expression vector is a fowlpox vector.

8. The fowlpox vector of claim 7 wherein the fowlpox vector is TROVAC.

9. A formulation for delivery and expression of a Theileria parva polypeptide, wherein the formulation comprises the vector according to claim 1 and a pharmaceutically or veterinarily acceptable carrier, vehicle or excipient.

10. The formulation according to claim 9, further comprising an attenuated vaccinia virus comprising a polynucleotide having a nucleotide base sequence capable of hybridizing under stringent conditions to a nucleotide base sequence selected from the group consisting of SEQ ID NOs: 1, 6, 12, 15, 17, 19, 24, 25, 29, 33, 36, 38, 43, 51-60, or the complement thereof, and wherein the stringent hybridizing conditions are selected from (a) 40 to 45% formamide, 1 M NaCl, 1% SDS at 37° Celsius, and a wash in 0.5-1×SSC at 55 to 60° Celsius and (b) 50% formamide, 1 M NaCl, 1% SDS at 37° Celsius, and a wash in 0.1×SSC at 60 to 65° Celsius, and wherein the nucleotide base sequence has between about 75% and about 100%, between about 80% and about 100%, between about 85% and about 100%, between about 90% and about 100%, between about 95% and about 100%, between about 75% and about 90%, between about 80% and about 90%, between about 85% and about 100%, or between about 85% and about 95%, between about 85% and about 90% homology with a nucleotide sequence seletected from the group consisting of SEQ ID NOs: 1, 6, 12, 15, 17, 19, 24, 25, 29, 33, 36, 38, 43, 51-60, or the complement thereof.

11. The formulation according to claim 10, wherein the attenuated vaccinia virus isNYVAC.

12. The formulation according to claim 9, wherein the vector is a fowlpox vector.

13. The formulation according to claim 12, wherein the fowlpox vector is TROVAC.

14. The formulation according to claim 9, wherein the vector is a canarypox vector.

15. The formulation according to claim 14, wherein the canarypox vector is ALVAC.

16. A method of delivering a Theileria parva antigen to an animal, comprising administering the formulation according to claim 9 to the animal.

17. A method of eliciting an immune response against a strain of Theileria in an animal, comprising administering a formulation according to claim 9 and in an effective amount for eliciting an immune response.

18. A method of inducing an immunological or protective response against a strain of Theileria in an animal, comprising administering to the animal an effective amount of the formulation according to claim 9.

19. A method of eliciting an immune response against a strain of Theileria in an animal, comprising administering a composition comprising a cell, wherein the cell comprises the vector according to claim 1 in an effective amount for eliciting an immune response.

20. A kit for performing a method of inducing an immunological or protective response against a strain of Theileria in an animal comprising the vector according to claim 1 and instructions for performing the method of delivery and expression of the vector in the animal.

21. A kit for performing a method of inducing an immunological or protective response against a strain of Theileria in an animal comprising the formulation according to claim 9 and instructions for performing the method of delivery and expression of the vector in the animal.

The application's sequence listing, which the Patent Office published only in electronic form, follows.

SEQUENCE LISTING (95 sequences)

SEQ ID NO: 1 - DNA, 1700 bp, Theileria parva
  CDS (35)..(1663)
gaattcggatccagaattcgtgattgccgccaccatgagggtcaaaaaagttttattatatacacttccggttgtcggtattttactggctggatctttgattatatttagtttcgttaggaaaagaccggaaaaagaagaggaactcaaacctccttctgcattagaagatgaacttaaaaaacgtgaagaagaaagccgaaaacgcatggaagaaatgcaaaaggaaattctcgaaaaaaagttaagagaaggtaaaaaagccttggaagaacttgaaaaacgtgaaaaagaagtggtagatgagtttgcaaaacacctcaaaaaacctgaagaaagacttcctaaaattattcttacattggattccggttttccaacagttgatcctattacatatacttcaggagtttatatggtagcagttagtaaaacaacttttaccccagattcagatcttgttgattttactcacacactgctgggcataaagtttctagttactggtgtacaatttggtgggaaaacatacacaattaaaccgattgaagctactatggccactttaattgcatttgccgctgatcctggattctgttattttctattaataccaggccctgactcgaaaccaatattcttcaaaaacgacggagataaatttttacgttgcgtagggtatccaaaggttaaagaagaaatgctagaaatggctacaaaattcaatagactaccaaagggcgtggaaatacctgcacctccaggagtaaaaccagaggctcccacacctacaccaacgacaataactctttctgtacctcctactataccaacgccaataactccttcggcacctcctactacaccacctacgggactaaattttaacttgacagttcagaacaaattcatgataggttcgcaagaagttaagttaaatataactcacgaatacgagggtgtatacgaagctcataaatatttcattgaaaggggcagctttacccctacctcattctcaatcggtgatcttccacaaacaggtcttccagtaaatcaaacagtggatacaattgtggtatatttccatcgagtaacgatgggtgaacccgttggtatacctctaattgtgctaatcttttataaaaaccaatctagaaaatatttaaataagggaaatggaaactgggaagaatctaaagctctattatttcgtgaggaacttgattacttagattccatttttaatgattttgtgacagtaaacctttctagacgttctgattattatcgtaatggaactggcacatcagaaattgagcaaacgttagatatgaatgtttacgttgaacctgatacaccctgtgctggatggacaacgtatatacataaattagaagaaggaggtgaaggaggaattgaaaaaccttttcaaattagacaattatggtttagtaaacagaaatttgatatattcccaatgggaaaagtttcaatcgttaatgtttatgggaaaaacgatgaaccgctatcttacgctccctcaattttcagtgtaatacgcgaagatggaattcaaatattttatgttcgtgcttactcacagtacttgcttgattcaagtgttaatccccaaaatttacctcaaaaattaaacaccctttagaatctgaattcgtcgacaagcttctcgagacgcg

SEQ ID NO: 2 - DNA, 60 bp, Artificial Sequence
  Description of Artificial Sequence: Synthetic primer
  CDS (31)..(60)
tatcgcgatatccgttaagtttgtatcgtaatgagggtcaaaaaagttttattatataca

SEQ ID NO: 3 - DNA, 43 bp, Artificial Sequence
  Description of Artificial Sequence: Synthetic primer
cgctcgagaaaaattactaaagggtgtttaatttttgaggtaa

SEQ ID NO: 4 - DNA, 27 bp, Artificial Sequence
  Description of Artificial Sequence: Synthetic primer
  CDS (1)..(27)
ataactccttcggtacctcctactata

SEQ ID NO: 5 - DNA, 27 bp, Artificial Sequence
  Description of Artificial Sequence: Synthetic primer
tatagtaggaggtaccgaaggagttat

SEQ ID NO: 6 - DNA, 6513 bp, Theileria parva
gcgcccaatacgcaaaccgcctctccccgcgcgttggccgattcattaatgcagctggcacgacaggtttcccgactggaaagcgggcagtgagcgcaacgcaattaatgtgagttagctcactcattaggcaccccaggctttacactttatgcttccggctcgtatgttgtgtggaattgtgagcggataacaatttcacacaggaaacagctatgaccatgattacgaattgcggccgcaattctgaatgttaaatgttatactttggatgaagctataaatatgcattggaaaaataatccatttaaagaaaggattcaaatactacaaaacctaagcgataatatgttaactaagcttattcttaacgacgctttaaatatacacaaataaacataatttttgtataacctaacaaataactaaaacataaaaataataaaaggaaatgtaatatcgtaattattttactcaggaatggggttaaatatttatatcacgtgtatatctatactgttatcgtatactctttacaattactattacgaatatgcaagagataataagattacgtatttaagagaatcttgtcatgataattgggtacgacatagtgataaatgctatttcgcatcgttacataaagtcagttggaaagatggatttgacagatgtaacttaataggtgcaaaaatgttaaataacagcattctatcggaagataggataccagttatattatacaaaaatcactggttggataaaacagattctgcaatattcgtaaaagatgaagattactgcgaatttgtaaactatgacaataaaaagccatttatctcaacgacatcgtgtaattcttccatgttttatgtatgtgtttcagatattatgagattactataaactttttgtatacttatattccgtaaactatattaatcatgaagaaaatgaaaaagtatagaagctgttcacgagcggttgttgaaaacaacaaaattatacattcaagatggcttacatatacgtctgtgaggctatcatggataatgacaatgcatctctaaataggtttttggacaatggattcgaccctaacacggaatatggtactctacaatctcctcttgaaatggctgtaatgttcaagaataccgaggctataaaaatcttgatgaggtatggagctaaacctgtagttactgaatgcacaacttcttgtctgcatgatgcggtgttgagagacgactacaaaatagtgaaagatctgttgaagaataactatgtaaacaatgttctttacagcggaggctttactcctttgtgtttggcagcttaccttaacaaagttaatttggttaaacttctattggctcattcggcggatgtagatatttcaaacacggatcggttaactcctctacatatagccgtatcaaataaaaatttaacaatggttaaacttctattgaacaaaggtgctgatactgacttgctggataacatgggacgtactcctttaatgatcgctgtacaatctggaaatattgaaatatgtagcacactacttaaaaaaaataaaatgtccagaactgggaaaaattgatcttgccagctgtaattcatggtagaaaagaagtgctcaggctacttttcaacaaaggagcagatgtaaactacatctttgaaagaaatggaaaatcatatactgttttggaattgattaaagaaagttactctgagacacaaaagaggtagctgaagtggtactctcaaaggtacgtgactaattagctataaaaaggatccgggttaattaattagtcatcaggcagggcgagaacgagactatctgctcgttaattaattagagcttctttattctatacttaaaaagtgaaaataaatacaaaggttcttgagggttgtgttaaattgaaagcgagaaataatcataaattatttcattatcgcgatatccgttaagtttgtatcgtaatgagggtcaaaaaagttttattatatacacttccggttgtcggtattttactggctggatctttgattatatttagtttcgttaggaaaagaccggaaaaagaagaggaactcaaacctccttctgcattagaagatgaacttaaaaaacgtgaagaagaaagccgaaaacgcatggaagaaatgcaaaaggaaattctcgaaaaaaagttaagagaaggtaaaaaagccttggaagaacttgaaaaacgtgaaaaagaagtggtagatgagtttgcaaaacacctcaaaaaacctgaagaaagacttcctaaaattattcttacattggattccggttttccaacagttgatcctattacatatacttcaggagtttatatggtagcagttagtaaaacaacttttaccccagattcagatcttgttgattttactcacacactgctgggcataaagtttctagttactggtgtacaatttggtgggaaaacatacacaattaaaccgattgaagctactatggccactttaattgcatttgccgctgatcctggattctgttattttctattaataccaggccctgactcgaaaccaatattcttcaaaaacgacggagataaatttttacgttgcgtagggtatccaaaggttaaagaagaaatgctagaaatggctacaaaattcaatagactaccaaagggcgtggaaatacctgcacctccaggagtaaaaccagaggctcccacacctacaccaacgacaataactctttctgtacctcctactataccaacgccaataactccttcggcacctcctactacaccacctacgggactaaattttaacttgacagttcagaacaaattcatgataggttcgcaagaagttaagttaaatataactcacgaatacgagggtgtatacgaagctcataaatatttcattgaaaggggcagctttacccctacctcattctcaatcggtgatcttccacaaacaggtcttccagtaaatcaaacagtggatacaattgtggtatatttccatcgagtaacgatgggtgaacccgttggtatacctctaattgtgctaatcttttataaaaaccaatctagaaaatatttaaataagggaaatggaaactgggaagaatctaaagctctattatttcgtgaggaacttgattacttagattccatttttaatgattttgtgacagtaaacctttctagacgttctgattattatcgtaatggaactggcacatcagaaattgagcaaacgttagatatgaatgtttacgttgaacctgatacaccctgtgctggatggacaacgtatatacataaattagaagaaggaggtgaaggaggaattgaaaaaccttttcaaattagacaattatggtttagtaaacagaaatttgatatattcccaatgggaaaagtttcaatcgttaatgtttatgggaaaaacgatgaaccgctatcttacgctccctcaattttcagtgtaatacgcgaagatggaattcaaatattttatgttcgtgcttactcacagtacttgcttgattcaagtgttaatccccaaaatttacctcaaaaattaaacaccctttagtaatttttctcgagtctagaatcgatcccgggtttttatgactagttaatcacggccgcttataaagatctaaaatgcataatttctaaataatgaaaaaaagtacatcatgagcaacgcgttagtatattttacaatggagattaacgctctataccgttctatgtttattgattcagatgatgttttagaaaagaaagttattgaatatgaaaactttaatgaagatgaagatgacgacgatgattattgttgtaaatctgttttagatgaagaagatgacgcgctaaagtatactatggttacaaagtataagtctatactactaatggcgacttgtgcaagaaggtatagtatagtgaaaatgttgttagattatgattatgaaaaaccaaataaatcagatccatatctaaaggtatctcctttgcacataatttcatctattcctagtttagaatacctgcagccaagcttggcactggccgtcgttttacaacgtcgtgactgggaaaaccctggcgttacccaacttaatcgccttgcagcacatccccctttcgccagctggcgtaatagcgaagaggcccgcaccgatcgcccttcccaacagttgcgcagcctgaatggcgaatggcgcctgatgcggtattttctccttacgcatctgtgcggtatttcacaccgcatatggtgcactctcagtacaatctgctctgatgccgcatagttaagccagccccgacacccgccaacacccgctgacgcgccctgacgggcttgtctgctcccggcatccgcttacagacaagctgtgaccgtctccgggagctgcatgtgtcagaggttttcaccgtcatcaccgaaacgcgcgagacgaaagggcctcgtgatacgcctatttttataggttaatgtcatgataataatggtttcttagacgtcaggtggcacttttcggggaaatgtgcgcggaacccctatttgtttatttttctaaatacattcaaatatgtatccgctcatgagacaataaccctgataaatgcttcaataatattgaaaaaggaagagtatgagtattcaacatttccgtgtcgcccttattcccttttttgcggcattttgccttcctgtttttgctcacccagaaacgctggtgaaagtaaaagatgctgaagatcagttgggtgcacgagtgggttacatcgaactggatctcaacagcggtaagatccttgagagttttcgccccgaagaacgttttccaatgatgagcacttttaaagttctgctatgtggcgcggtattatcccgtattgacgccgggcaagagcaactcggtcgccgcatacactattctcagaatgacttggttgagtactcaccagtcacagaaaagcatcttacggatggcatgacagtaagagaattatgcagtgctgccataaccatgagtgataacactgcggccaacttacttctgacaacgatcggaggaccgaaggagctaaccgcttttttgcacaacatgggggatcatgtaactcgccttgatcgttgggaaccggagctgaatgaagccataccaaacgacgagcgtgacaccacgatgcctgtagcaatggcaacaacgttgcgcaaactattaactggcgaactacttactctagcttcccggcaacaattaatagactggatggaggcggataaagttgcaggaccacttctgcgctcggcccttccggctggctggtttattgctgataaatctggagccggtgagcgtgggtctcgcggtatcattgcagcactggggccagatggtaagccctcccgtatcgtagttatctacacgacggggagtcaggcaactatggatgaacgaaatagacagatcgctgagataggtgcctcactgattaagcattggtaactgtcagaccaagtttactcatatatactttagattgatttaaaacttcatttttaatttaaaaggatctaggtgaagatcctttttgataatctcatgaccaaaatcccttaacgtgagttttcgttccactgagcgtcagaccccgtagaaaagatcaaaggatcttcttgagatcctttttttctgcgcgtaatctgctgcttgcaaacaaaaaaaccaccgctaccagcggtggtttgtttgccggatcaagagctaccaactctttttccgaaggtaactggcttcagcagagcgcagataccaaatactgtccttctagtgtagccgtagttaggccaccacttcaagaactctgtagcaccgcctacatacctcgctctgctaatcctgttaccagtggctgctgccagtggcgataagtcgtgtcttaccgggttggactcaagacgatagttaccggataaggcgcagcggtcgggctgaacggggggttcgtgcacacagcccagcttggagcgaacgacctacaccgaactgagatacctacagcgtgagctatgagaaagcgccacgcttcccgaagggagaaaggcggacaggtatccggtaagcggcagggtcggaacaggagagcgcacgagggagcttccagggggaaacgcctggtatctttatagtcctgtcgggtttcgccacctctgacttgagcgtcgatttttgtgatgctcgtcaggggggcggagcctatggaaaaacgccagcaacgcggcctttttacggttcctggccttttgctggccttttgctcacatgttctttcctgcgttatcccctgattctgtggataaccgtattaccgcctttgagtgagctgataccgctcgccgcagccgaacgaccgagcgcagcgagtcagtgagcgaggaagcggaaga

SEQ ID NO: 7 - protein, 543 aa, Theileria parva
MRVKKVLLYTLPVVGILLAGSLIIFSFVRKRPEKEEELKPPSALEDELKKREEESRKRMEEMQKEILEKKLREGKKALEELEKREKEVVDEFAKHLKKPEERLPKIILTLDSGFPTVDPITYTSGVYMVAVSKTTFTPDSDLVDFTHTLLGIKFLVTGVQFGGKTYTIKPIEATMATLIAFAADPGFCYFLLIPGPDSKPIFFKNDGDKFLRCVGYPKVKEEMLEMATKFNRLPKGVEIPAPPGVKPEAPTPTPTTITLSVPPTIPTPITPSAPPTTPPTGLNFNLTVQNKFMIGSQEVKLNITHEYEGVYEAHKYFIERGSFTPTSFSIGDLPQTGLPVNQTVDTIVVYFHRVTMGEPVGIPLIVLIFYKNQSRKYLNKGNGNWEESKALLFREELDYLDSIFNDFVTVNLSRRSDYYRNGTGTSEIEQTLDMNVYVEPDTPCAGWTTYIHKLEEGGEGGIEKPFQIRQLWFSKQKFDIFPMGKVSIVNVYGKNDEPLSYAPSIFSVIREDGIQIFYVRAYSQYLLDSSVNPQNLPQKLNTL

SEQ ID NO: 8 - DNA, 26 bp, Artificial Sequence
  Description of Artificial Sequence: Synthetic primer
actcacacactgctgggcataaagtt

SEQ ID NO: 9 - DNA, 26 bp, Artificial Sequence
  Description of Artificial Sequence: Synthetic primer
gaacgtctagaaaggtttactgtcac

SEQ ID NO: 10 - DNA, 25 bp, Artificial Sequence
  Description of Artificial Sequence: Synthetic primer
gaatctgttagttagttacttggat

SEQ ID NO: 11 - DNA, 25 bp, Artificial Sequence
  Description of Artificial Sequence: Synthetic primer
tgattatagctattatcacagactc

SEQ ID NO: 12 - DNA, 4108 bp, Theileria parva
tgatcaaataaacaagaatctgttagttagttacttggataaattaatcgagacgcgtgataaaatgactatgtaccgttattgcatgaacgatattataaatataggttctcgtaggagagaactattgactatggcaatgaatgttaaaatgttatactttggatgaagctataaatatgcattggaaaaataatccatttaaagaaaggattcaaatactacaaaacctaagcgataatatgttaactaagcttattcttaacgacgctttaaatatacacaaataaacataatttttgtataacctaacaaataactaaaacataaaaataataaaaggaaatgtaatatcgtaattattttactcaggaatggggttaaatatttatatcacgtgtatatctatactgttatcgtatactctttacaattactattacgaatatgcaagagataataagattacgtatttaagagaatcttgtcatgataattgggtacgacatagtgataaatgctatttcgcatcgttacataaagtcagttggaaagatggatttgacagatgtaacttaataggtgcaaaaatgttaaataacagcattctatcggaagataggataccagttatattatacaaaaatcactggttggataaaacagattctgcaatattcgtaaaagatgaagattactgcgaatttgtaaactatgacaataaaaagccatttatctcaacgacatcgtgtaattcttccatgttttatgtatgtgtttcagatattatgagattactataaactttttgtatacttatattccgtaaactatattaatcatgaagaaaatgaaaaagtatagaagctgttcacgagcggttgttgaaaacaacaaaattatacattcaagatggcttacatatacgtctgtgaggctatcatggataatgacaatgcatctctaaataggtttttggacaatggattcgaccctaacacggaatatggtactctacaatctcctcttgaaatggctgtaatgttcaagaataccgaggctataaaaatcttgatgaggtatggagctaaacctgtagttactgaatgcacaacttcttgtctgcatgatgcggtgttgagagacgactacaaaatagtgaaagatctgttgaagaataactatgtaaacaatgttctttacagcggaggctttactcctttgtgtttggcagcttaccttaacaaagttaatttggttaaacttctattggctcattcggcggatgtagatatttcaaacacggatcggttaactcctctacatatagccgtatcaaataaaaatttaacaatggttaaacttctattgaacaaaggtgctgatactgacttgctggataacatgggacgtactcctttaatgatcgctgtacaatctggaaatattgaaatatgtagcacactacttaaaaaaaataaaatgtccagaactgggaaaaattgatcttgccagctgtaattcatggtagaaaagaagtgctcaggctacttttcaacaaaggagcagatgtaaactacatctttgaaagaaatggaaaatcatatactgttttggaattgattaaagaaagttactctgagacacaaaagaggtagctgaagtggtactctcaaaggtacgtgactaattagctataaaaaggatccgggttaattaattagtcatcaggcagggcgagaacgagactatctgctcgttaattaattagagcttctttattctatacttaaaaagtgaaaataaatacaaaggttcttgagggttgtgttaaattgaaagcgagaaataatcataaattatttcattatcgcgatatccgttaagtttgtatcgtaatgagggtcaaaaaagttttattatatacacttccggttgtcggtattttactggctggatctttgattatatttagtttcgttaggaaaagaccggaaaaagaagaggaactcaaacctccttctgcattagaagatgaacttaaaaaacgtgaagaagaaagccgaaaacgcatggaagaaatgcaaaaggaaattctcgaaaaaaagttaagagaaggtaaaaaagccttggaagaacttgaaaaacgtgaaaaagaagtggtagatgagtttgcaaaacacctcaaaaaacctgaagaaagacttcctaaaattattcttacattggattccggttttccaacagttgatcctattacatatacttcaggagtttatatggtagcagttagtaaaacaacttttaccccagattcagatcttgttgattttactcacacactgctgggcataaagtttctagttactggtgtacaatttggtgggaaaacatacacaattaaaccgattgaagctactatggccactttaattgcatttgccgctgatcctggattctgttattttctattaataccaggccctgactcgaaaccaatattcttcaaaaacgacggagataaatttttacgttgcgtagggtatccaaaggttaaagaagaaatgctagaaatggctacaaaattcaatagactaccaaagggcgtggaaatacctgcacctccaggagtaaaaccagaggctcccacacctacaccaacgacaataactctttctgtacctcctactataccaacgccaataactccttcggcacctcctactacaccacctacgggactaaattttaacttgacagttcagaacaaattcatgataggttcgcaagaagttaagttaaatataactcacgaatacgagggtgtatacgaagctcataaatatttcattgaaaggggcagctttacccctacctcattctcaatcggtgatcttccacaaacaggtcttccagtaaatcaaacagtggatacaattgtggtatatttccatcgagtaacgatgggtgaacccgttggtatacctctaattgtgctaatcttttataaaaaccaatctagaaaatatttaaataagggaaatggaaactgggaagaatctaaagctctattatttcgtgaggaacttgattacttagattccatttttaatgattttgtgacagtaaacctttctagacgttctgattattatcgtaatggaactggcacatcagaaattgagcaaacgttagatatgaatgtttacgttgaacctgatacaccctgtgctggatggacaacgtatatacataaattagaagaaggaggtgaaggaggaattgaaaaaccttttcaaattagacaattatggtttagtaaacagaaatttgatatattcccaatgggaaaagtttcaatcgttaatgtttatgggaaaaacgatgaaccgctatcttacgctccctcaattttcagtgtaatacgcgaagatggaattcaaatattttatgttcgtgcttactcacagtacttgcttgattcaagtgttaatccccaaaatttacctcaaaaattaaacaccctttagtaatttttctcgagtctagaatcgatcccgggtttttatgactagttaatcacggccgcttataaagatctaaaatgcataatttctaaataatgaaaaaaagtacatcatgagcaacgcgttagtatattttacaatggagattaacgctctataccgttctatgtttattgattcagatgatgttttagaaaagaaagttattgaatatgaaaactttaatgaagatgaagatgacgacgatgattattgttgtaaatctgttttagatgaagaagatgacgcgctaaagtatactatggttacaaagtataagtctatactactaatggcgacttgtgcaagaaggtatagtatagtgaaaatgttgttagattatgattatgaaaaaccaaataaatcagatccatatctaaaggtatctcctttgcacataatttcatctattcctagtttagaatacttttcattatatttgtttacagctgaagacgaaaaaaatatatcgataatagaagattatgttaactctgctaataagatgaaattgaatgagtctgtgataatagctataatca

SEQ ID NO: 13 - DNA, 60 bp, Artificial Sequence
  Description of Artificial Sequence: Synthetic primer
  CDS (31)..(60)
tatcgcgatatccgttaagtttgtatcgtaatgaaattggccgccagattaattagcctt

SEQ ID NO: 14 - DNA, 39 bp, Artificial Sequence
  Description of Artificial Sequence: Synthetic primer
ggtctagaaaaattactatgaagtgccggaggcttctcc

SEQ ID NO: 15 - DNA, 5399 bp, Theileria parva
gcgcccaatacgcaaaccgcctctccccgcgcgttggccgattcattaatgcagctggcacgacaggtttcccgactggaaagcgggcagtgagcgcaacgcaattaatgtgagttagctcactcattaggcaccccaggctttacactttatgcttccggctcgtatgttgtgtggaattgtgagcggataacaatttcacacaggaaacagctatgaccatgattacgaattgcggccgcaattctgaatgttaaatgttatactttggatgaagctataaatatgcattggaaaaataatccatttaaagaaaggattcaaatactacaaaacctaagcgataatatgttaactaagcttattcttaacgacgctttaaatatacacaaataaacataatttttgtataacctaacaaataactaaaacataaaaataataaaaggaaatgtaatatcgtaattattttactcaggaatggggttaaatatttatatcacgtgtatatctatactgttatcgtatactctttacaattactattacgaatatgcaagagataataagattacgtatttaagagaatcttgtcatgataattgggtacgacatagtgataaatgctatttcgcatcgttacataaagtcagttggaaagatggatttgacagatgtaacttaataggtgcaaaaatgttaaataacagcattctatcggaagataggataccagttatattatacaaaaatcactggttggataaaacagattctgcaatattcgtaaaagatgaagattactgcgaatttgtaaactatgacaataaaaagccatttatctcaacgacatcgtgtaattcttccatgttttatgtatgtgtttcagatattatgagattactataaactttttgtatacttatattccgtaaactatattaatcatgaagaaaatgaaaaagtatagaagctgttcacgagcggttgttgaaaacaacaaaattatacattcaagatggcttacatatacgtctgtgaggctatcatggataatgacaatgcatctctaaataggtttttggacaatggattcgaccctaacacggaatatggtactctacaatctcctcttgaaatggctgtaatgttcaagaataccgaggctataaaaatcttgatgaggtatggagctaaacctgtagttactgaatgcacaacttcttgtctgcatgatgcggtgttgagagacgactacaaaatagtgaaagatctgttgaagaataactatgtaaacaatgttctttacagcggaggctttactcctttgtgtttggcagcttaccttaacaaagttaatttggttaaacttctattggctcattcggcggatgtagatatttcaaacacggatcggttaactcctctacatatagccgtatcaaataaaaatttaacaatggttaaacttctattgaacaaaggtgctgatactgacttgctggataacatgggacgtactcctttaatgatcgctgtacaatctggaaatattgaaatatgtagcacactacttaaaaaaaataaaatgtccagaactgggaaaaattgatcttgccagctgtaattcatggtagaaaagaagtgctcaggctacttttcaacaaaggagcagatgtaaactacatctttgaaagaaatggaaaatcatatactgttttggaattgattaaagaaagttactctgagacacaaaagaggtagctgaagtggtactctcaaaggtacgtgactaattagctataaaaaggatccgggttaattaattagtcatcaggcagggcgagaacgagactatctgctcgttaattaattagagcttctttattctatacttaaaaagtgaaaataaatacaaaggttcttgagggttgtgttaaattgaaagcgagaaataatcataaattatttcattatcgcgatatccgttaagtttgtatcgtaatgaaattggccgccagattaattagcctttactttattatttacattttacattccccagtgctgggaggtaattgtagtcatgaagaactaaaaaaattgggaatgctagagggcgatggtttcgacagggatgcattgttcaaatcatcacatggtatgggaaaggtaggaaaaaggtatggtcttaaaactactccaaaagtagataaagtcttagcagatcttgaaacactgtttggaaaacacggtcttggtggtattagtaaagattgtcttaaatgttttgcacaaagcctagtgtgcgtattaatgaaatgtagaggagcatgtctcaaaggaccatgtactgacgactgccaaaattgctttgatagaaactgtaaatctgcattgctggaatgcattgggaaaacaagtattccaaatccatgtaaatggaaagaagattatctaaaatacaaatttcctgaaacagatgaggacgaatctacgaaaaaaggagaagcctccggcacttcatagtaatttttctagaatcgatcccgggtttttatgactagttaatcacggccgcttataaagatctaaaatgcataatttctaaataatgaaaaaaagtacatcatgagcaacgcgttagtatattttacaatggagattaacgctctataccgttctatgtttattgattcagatgatgttttagaaaagaaagttattgaatatgaaaactttaatgaagatgaagatgacgacgatgattattgttgtaaatctgttttagatgaagaagatgacgcgctaaagtatactatggttacaaagtataagtctatactactaatggcgacttgtgcaagaaggtatagtatagtgaaaatgttgttagattatgattatgaaaaaccaaataaatcagatccatatctaaaggtatctcctttgcacataatttcatctattcctagtttagaatacctgcagccaagcttggcactggccgtcgttttacaacgtcgtgactgggaaaaccctggcgttacccaacttaatcgccttgcagcacatccccctttcgccagctggcgtaatagcgaagaggcccgcaccgatcgcccttcccaacagttgcgcagcctgaatggcgaatggcgcctgatgcggtattttctccttacgcatctgtgcggtatttcacaccgcatatggtgcactctcagtacaatctgctctgatgccgcatagttaagccagccccgacacccgccaacacccgctgacgcgccctgacgggcttgtctgctcccggcatccgcttacagacaagctgtgaccgtctccgggagctgcatgtgtcagaggttttcaccgtcatcaccgaaacgcgcgagacgaaagggcctcgtgatacgcctatttttataggttaatgtcatgataataatggtttcttagacgtcaggtggcacttttcggggaaatgtgcgcggaacccctatttgtttatttttctaaatacattcaaatatgtatccgctcatgagacaataaccctgataaatgcttcaataatattgaaaaaggaagagtatgagtattcaacatttccgtgtcgcccttattcccttttttgcggcattttgccttcctgtttttgctcacccagaaacgctggtgaaagtaaaagatgctgaagatcagttgggtgcacgagtgggttacatcgaactggatctcaacagcggtaagatccttgagagttttcgccccgaagaacgttttccaatgatgagcacttttaaagttctgctatgtggcgcggtattatcccgtattgacgccgggcaagagcaactcggtcgccgcatacactattctcagaatgacttggttgagtactcaccagtcacagaaaagcatcttacggatggcatgacagtaagagaattatgcagtgctgccataaccatgagtgataacactgcggccaacttacttctgacaacgatcggaggaccgaaggagctaaccgcttttttgcacaacatgggggatcatgtaactcgccttgatcgttgggaaccggagctgaatgaagccataccaaacgacgagcgtgacaccacgatgcctgtagcaatggcaacaacgttgcgcaaactattaactggcgaactacttactctagcttcccggcaacaattaatagactggatggaggcggataaagttgcaggaccacttctgcgctcggcccttccggctggctggtttattgctgataaatctggagccggtgagcgtgggtctcgcggtatcattgcagcactggggccagatggtaagccctcccgtatcgtagttatctacacgacggggagtcaggcaactatggatgaacgaaatagacagatcgctgagataggtgcctcactgattaagcattggtaactgtcagaccaagtttactcatatatactttagattgatttaaaacttcatttttaatttaaaaggatctaggtgaagatcctttttgataatctcatgaccaaaatcccttaacgtgagttttcgttccactgagcgtcagaccccgtagaaaagatcaaaggatcttcttgagatcctttttttctgcgcgtaatctgctgcttgcaaacaaaaaaaccaccgctaccagcggtggtttgtttgccggatcaagagctaccaactctttttccgaaggtaactggcttcagcagagcgcagataccaaatactgtccttctagtgtagccgtagttaggccaccacttcaagaactctgtagcaccgcctacatacctcgctctgctaatcctgttaccagtggctgctgccagtggcgataagtcgtgtcttaccgggttggactcaagacgatagttaccggataaggcgcagcggtcgggctgaacggggggttcgtgcacacagcccagcttggagcgaacgacctacaccgaactgagatacctacagcgtgagctatgagaaagcgccacgcttcccgaagggagaaaggcggacaggtatccggtaagcggcagggtcggaacaggagagcgcacgagggagcttccagggggaaacgcctggtatctttatagtcctgtcgggtttcgccacctctgacttgagcgtcgatttttgtgatgctcgtcaggggggcggagcctatggaaaaacgccagcaacgcggcctttttacggttcctggccttttgctggccttttgctcacatgttctttcctgcgttatcccctgattctgtggataaccgtattaccgcctttgagtgagctgataccgctcgccgcagccgaacgaccgagcgcagcgagtcagtgagcgaggaagcggaaga

SEQ ID NO: 16 - protein, 174 aa, Theileria parva
MKLAARLISLYFIIYILHSPVLGGNCSHEELKKLGMLEGDGFDRDALFKSSHGMGKVGKRYGLKTTPKVDKVLADLETLFGKHGLGGISKDCLKCFAQSLVCVLMKCRGACLKGPCTDDCQNCFDRNCKSALLECIGKTSIPNPCKWKEDYLKYKFPETDEDESTKKGEASGTS

SEQ ID NO: 17 - DNA, 2978 bp, Theileria parva
gaatctgttagttagttacttggataaattaatcgagacgcgtgataaaatgactatgtaccgttattgcatgaacgatattataaatataggttctcgtaggagagaactattgactatggcaatgaatgttaaatgttatactttggatgaagctataaatatgcattggaaaaataatccatttaaagaaaggattcaaatactacaaaacctaagcgataatatgttaactaagcttattcttaacgacgctttaaatatacacaaataaacataatttttgtataacctaacaaataactaaaacataaaaataataaaaggaaatgtaatatcgtaattattttactcaggaatggggttaaatatttatatcacgtgtatatctatactgttatcgtatactctttacaattactattacgaatatgcaagagataataagattacgtatttaagagaatcttgtcatgataattgggtacgacatagtgataaatgctatttcgcatcgttacataaagtcagttggaaagatggatttgacagatgtaacttaataggtgcaaaaatgttaaataacagcattctatcggaagataggataccagttatattatacaaaaatcactggttggataaaacagattctgcaatattcgtaaaagatgaagattactgcgaatttgtaaactatgacaataaaaagccatttatctcaacgacatcgtgtaattcttccatgttttatgtatgtgtttcagatattatgagattactataaactttttgtatacttatattccgtaaactatattaatcatgaagaaaatgaaaaagtatagaagctgttcacgagcggttgttgaaaacaacaaaattatacattcaagatggcttacatatacgtctgtgaggctatcatggataatgacaatgcatctctaaataggtttttggacaatggattcgaccctaacacggaatatggtactctacaatctcctcttgaaatggctgtaatgttcaagaataccgaggctataaaaatcttgatgaggtatggagctaaacctgtagttactgaatgcacaacttcttgtctgcatgatgcggtgttgagagacgactacaaaatagtgaaagatctgttgaagaataactatgtaaacaatgttctttacagcggaggctttactcctttgtgtttggcagcttaccttaacaaagttaatttggttaaacttctattggctcattcggcggatgtagatatttcaaacacggatcggttaactcctctacatatagccgtatcaaataaaaatttaacaatggttaaacttctattgaacaaaggtgctgatactgacttgctggataacatgggacgtactcctttaatgatcgctgtacaatctggaaatattgaaatatgtagcacactacttaaaaaaaataaaatgtccagaactgggaaaaattgatcttgccagctgtaattcatggtagaaaagaagtgctcaggctacttttcaacaaaggagcagatgtaaactacatctttgaaagaaatggaaaatcatatactgttttggaattgattaaagaaagttactctgagacacaaaagaggtagctgaagtggtactctcaaaggtacgtgactaattagctataaaaaggatccgggttaattaattagtcatcaggcagggcgagaacgagactatctgctcgttaattaattagagcttctttattctatacttaaaaagtgaaaataaatacaaaggttcttgagggttgtgttaaattgaaagcgagaaataatcataaattatttcattatcgcgatatccgttaagtttgtatcgtaatgaaattggccgccagattaattagcctttactttattatttacattttacattccccagtgctgggaggtaattgtagtcatgaagaactaaaaaaattgggaatgctagagggcgatggtttcgacagggatgcattgttcaaatcatcacatggtatgggaaaggtaggaaaaaggtatggtcttaaaactactccaaaagtagataaagtcttagcagatcttgaaacactgtttggaaaacacggtcttggtggtattagtaaagattgtcttaaatgttttgcacaaagcctagtgtgcgtattaatgaaatgtagaggagcatgtctcaaaggaccatgtactgacgactgccaaaattgctttgatagaaactgtaaatctgcattgctggaatgcattgggaaaacaagtattccaaatccatgtaaatggaaagaagattatctaaaatacaaatttcctgaaacagatgaggacgaatctacgaaaaaaggagaagcctccggcacttcatagtaatttttctagaatcgatcccgggtttttatgactagttaatcacggccgcttataaagatctaaaatgcataatttctaaataatgaaaaaaagtacatcatgagcaacgcgttagtatattttacaatggagattaacgctctataccgttctatgtttattgattcagatgatgttttagaaaagaaagttattgaatatgaaaactttaatgaagatgaagatgacgacgatgattattgttgtaaatctgttttagatgaagaagatgacgcgctaaagtatactatggttacaaagtataagtctatactactaatggcgacttgtgcaagaaggtatagtatagtgaaaatgttgttagattatgattatgaaaaaccaaataaatcagatccatatctaaaggtatctcctttgcacataatttcatctattcctagtttagaatacttttcattatatttgtttacagctgaagacgaaaaaaatatatcgataatagaagattatgttaactctgctaataagatgaaattgaatgagtctgtgataatagctataatca

SEQ ID NO: 18 - DNA, 24 bp, Artificial Sequence
  Description of Artificial Sequence: Synthetic primer
acttgttttcccaatgcattccag

SEQ ID NO: 19 - DNA, 855 bp, Theileria parva
  CDS (1)..(855)
atgaaattaaatactatcgcaatagccttcctgtattcctgtttctcacagtttttaaaaaatgtgtctgctctgaggcgtagttctccagatttgtcaccagatggttcttttcttcaagtaaaatcagcttctcctcaggataaacaagatgtaatccaaagttcctctcctaaggtaacagtgcctacggttgaccctgaaggcctcaagaaggcggttactgcagcagttctatcaaaccaaaatcaagctctacaaaacggtgctcttaatccagcagatttcactcaagctgcctctgttaattccatgagtaatgctgttagtgccatgaacaatactgttggtccagtaaaaaatcccatggctactgttggtactatgaactcctttactggaatgcctggtgtacaggataattttcctcagacaccgcctgttaatgttcaagacacctctacccaggagaacagtcttgacaacctaaatctcctcttagatccctcgttagtaaagatatctcaagctgatagtcacataaaagaaagcatggaaaaagctgtacacagccttaaaaaggtcttggaggggctaaccaaccttgcgactctgtctaaaagtagggatactgaaccgtttaatgttctgggggatgactatacgatgcgtaacgttttggacctcatgaataaggaactcaggcaggttgaatctcttcagaaagttgtgttccaattcaacgcctttgcactttccaccttcactaagagtccagacgataataaaaaatccctcgagtcctacataccatctgccgaaaagatcattcctaaccctttgctaggactagac

SEQ ID NO: 20 - DNA, 33 bp, Artificial Sequence
  Description of Artificial Sequence: Synthetic primer
gctctagaaaaatcagtctagtcctagcaaagg

SEQ ID NO: 21 - DNA, 50 bp, Artificial Sequence
  Description of Artificial Sequence: Synthetic primer
  CDS (30)..(50)
atcgcgatatccgttaagtttgtatcgtaatgaaattaaatactatcgca

SEQ ID NO: 22 - DNA, 30 bp, Artificial Sequence
  Description of Artificial Sequence: Synthetic primer
atcgcaatagccttcctgtattcctgtttc

SEQ ID NO: 23 - DNA, 30 bp, Artificial Sequence
  Description of Artificial Sequence: Synthetic primer
gaaacaggaatacaggaaggctattgcgat

SEQ ID NO: 24 - DNA, 5729 bp, Theileria parva
gcgcccaatacgcaaaccgcctctccccgcgcgttggccgattcattaatgcagctggcacgacaggtttcccgactggaaagcgggcagtgagcgcaacgcaattaatgtgagttagctcactcattaggcaccccaggctttacactttatgcttccggctcgtatgttgtgtggaattgtgagcggataacaatttcacacaggaaacagctatgaccatgattacgaattgcggccgcaattctgaatgttaaatgttatactttggatgaagctataaatatgcattggaaaaataatccatttaaagaaaggattcaaatactacaaaacctaagcgataatatgttaactaagcttattcttaacgacgctttaaatatacacaaataaacataatttttgtataacctaacaaataactaaaacataaaaataataaaaggaaatgtaatatcgtaattattttactcaggaatggggttaaatatttatatcacgtgtatatctatactgttatcgtatactctttacaattactattacgaatatgcaagagataataagattacgtatttaagagaatcttgtcatgataattgggtacgacatagtgataaatgctatttcgcatcgttacataaagtcagttggaaagatggatttgacagatgtaacttaataggtgcaaaaatgttaaataacagcattctatcggaagataggataccagttatattatacaaaaatcactggttggataaaacagattctgcaatattcgtaaaagatgaagattactgcgaatttgtaaactatgacaataaaaagccatttatctcaacgacatcgtgtaattcttccatgttttatgtatgtgtttcagatattatgagattactataaactttttgtatacttatattccgtaaactatattaatcatgaagaaaatgaaaaagtatagaagctgttcacgagcggttgttgaaaacaacaaaattatacattcaagatggcttacatatacgtctgtgaggctatcatggataatgacaatgcatctctaaataggtttttggacaatggattcgaccctaacacggaatatggtactctacaatctcctcttgaaatggctgtaatgttcaagaataccgaggctataaaaatcttgatgaggtatggagctaaacctgtagttactgaatgcacaacttcttgtctgcatgatgcggtgttgagagacgactacaaaatagtgaaagatctgttgaagaataactatgtaaacaatgttctttacagcggaggctttactcctttgtgtttggcagcttaccttaacaaagttaatttggttaaacttctattggctcattcggcggatgtagatatttcaaacacggatcggttaactcctctacatatagccgtatcaaataaaaatttaacaatggttaaacttctattgaacaaaggtgctgatactgacttgctggataacatgggacgtactcctttaatgatcgctgtacaatctggaaatattgaaatatgtagcacactacttaaaaaaaataaaatgtccagaactgggaaaaattgatcttgccagctgtaattcatggtagaaaagaagtgctcaggctacttttcaacaaaggagcagatgtaaactacatctttgaaagaaatggaaaatcatatactgttttggaattgattaaagaaagttactctgagacacaaaagaggtagctgaagtggtactctcaaaggtacgtgactaattagctataaaaaggatccgggttaattaattagtcatcaggcagggcgagaacgagactatctgctcgttaattaattagagcttctttattctatacttaaaaagtgaaaataaatacaaaggttcttgagggttgtgttaaattgaaagcgagaaataatcataaattatttcattatcgcgatatccgttaagtttgtatcgtaatgaaattaaatactatcgcaatagccttcctgtattcctgtttctcacagtttttaaaaaatgtgtctgctctgaggcgtagttctccagatttgtcaccagatggttcttttcttcaagtaaaatcagcttctcctcaggataaacaagatgtaatccaaagttcctctcctaaggtaacagtgcctacggttgaccctgaaggcctcaagaaggcggttactgcagcagttctatcaaaccaaaatcaagctctacaaaacggtgctcttaatccagcagatttcactcaagctgcctctgttaattccatgagtaatgctgttagtgccatgaacaatactgttggtccagtaaaaaatcccatggctactgttggtactatgaactcctttactggaatgcctggtgtacaggataattttcctcagacaccgcctgttaatgttcaagacacctctacccaggagaacagtcttgacaacctaaatctcctcttagatccctcgttagtaaagatatctcaagctgatagtcacataaaagaaagcatggaaaaagctgtacacagccttaaaaaggtcttggaggggctaaccaaccttgcgactctgtctaaaagtagggatactgaaccgtttaatgttctgggggatgactatacgatgcgtaacgttttggacctcatgaataaggaactcaggcaggttgaatctcttcagaaagttgtgttccaattcaacgcctttgcactttccaccttcactaagagtccagacgataataaaaaatccctcgagtcctacataccatctgccgaaaagatcattcctaaccctttgctaggactagactgatttttctagaatcgatcccgggtttttatgactagttaatcacggccgcttataaagatctaaaatgcataatttctaaataatgaaaaaaagtacatcatgagcaacgcgttagtatattttacaatggagattaacgctctataccgttctatgtttattgattcagatgatgttttagaaaagaaagttattgaatatgaaaactttaatgaagatgaagatgacgacgatgattattgttgtaaatctgttttagatgaagaagatgacgcgctaaagtatactatggttacaaagtataagtctatactactaatggcgacttgtgcaagaaggtatagtatagtgaaaatgttgttagattatgattatgaaaaaccaaataaatcagatccatatctaaaggtatctcctttgcacataatttcatctattcctagtttagaatacctgcagccaagcttggcactggccgtcgttttacaacgtcgtgactgggaaaaccctggcgttacccaacttaatcgccttgcagcacatccccctttcgccagctggcgtaatagcgaagaggcccgcaccgatcgcccttcccaacagttgcgcagcctgaatggcgaatggcgcctgatgcggtattttctccttacgcatctgtgcggtatttcacaccgcatatggtgcactctcagtacaatctgctctgatgccgcatagttaagccagccccgacacccgccaacacccgctgacgcgccctgacgggcttgtctgctcccggcatccgcttacagacaagctgtgaccgtctccgggagctgcatgtgtcagaggttttcaccgtcatcaccgaaacgcgcgagacgaaagggcctcgtgatacgcctatttttataggttaatgtcatgataataatggtttcttagacgtcaggtggcacttttcggggaaatgtgcgcggaacccctatttgtttatttttctaaatacattcaaatatgtatccgctcatgagacaataaccctgataaatgcttcaataatattgaaaaaggaagagtatgagtattcaacatttccgtgtcgcccttattcccttttttgcggcattttgccttcctgtttttgctcacccagaaacgctggtgaaagtaaaagatgctgaagatcagttgggtgcacgagtgggttacatcgaactggatctcaacagcggtaagatccttgagagttttcgccccgaagaacgttttccaatgatgagcacttttaaagttctgctatgtggcgcggtattatcccgtattgacgccgggcaagagcaactcggtcgccgcatacactattctcagaatgacttggttgagtactcaccagtcacagaaaagcatcttacggatggcatgacagtaagagaattatgcagtgctgccataaccatgagtgataacactgcggccaacttacttctgacaacgatcggaggaccgaaggagctaaccgcttttttgcacaacatgggggatcatgtaactcgccttgatcgttgggaaccggagctgaatgaagccataccaaacgacgagcgtgacaccacgatgcctgtagcaatggcaacaacgttgcgcaaactattaactggcgaactacttactctagcttcccggcaacaattaatagactggatggaggcggataaagttgcaggaccacttctgcgctcggcccttccggctggctggtttattgctgataaatctggagccggtgagcgtgggtctcgcggtatcattgcagcactggggccagatggtaagccctcccgtatcgtagttatctacacgacggggagtcaggcaactatggatgaacgaaatagacagatcgctgagataggtgcctcactgattaagcattggtaactgtcagaccaagtttactcatatatactttagattgatttaaaacttcatttttaatttaaaaggatctaggtgaagatcctttttgataatctcatgaccaaaatcccttaacgtgagttttcgttccactgagcgtcagaccccgtagaaaagatcaaaggatcttcttgagatcctttttttctgcgcgtaatctgctgcttgcaaacaaaaaaaccaccgctaccagcggtggtttgtttgccggatcaagagctaccaactctttttccgaaggtaactggcttcagcagagcgcagataccaaatactgtccttctagtgtagccgtagttaggccaccacttcaagaactctgtagcaccgcctacatacctcgctctgctaatcctgttaccagtggctgctgccagtggcgataagtcgtgtcttaccgggttggactcaagacgatagttaccggataaggcgcagcggtcgggctgaacggggggttcgtgcacacagcccagcttggagcgaacgacctacaccgaactgagatacctacagcgtgagctatgagaaagcgccacgcttcccgaagggagaaaggcggacaggtatccggtaagcggcagggtcggaacaggagagcgcacgagggagcttccagggggaaacgcctggtatctttatagtcctgtcgggtttcgccacctctgacttgagcgtcgatttttgtgatgctcgtcaggggggcggagcctatggaaaaacgccagcaacgcggcctttttacggttcctggccttttgctggccttttgctcacatgttctttcctgcgttatcccctgattctgtggataaccgtattaccgcctttgagtgagctgataccgctcgccgcagccgaacgaccgagcgcagcgagtcagtgagcgaggaagcggaaga

SEQ ID NO: 25 - DNA, 3308 bp, Theileria parva
  CDS (1883)..(2737)
gaatctgttagttagttacttggataaattaatcgagacgcgtgataaaatgactatgtaccgttattgcatgaacgatattataaatataggttctcgtaggagagaactattgactatggcaatgaatgttaaatgttatactttggatgaagctataaatatgcattggaaaaataatccatttaaagaaaggattcaaatactacaaaacctaagcgataatatgttaactaagcttattcttaacgacgctttaaatatacacaaataaacataatttttgtataacctaacaaataactaaaacataaaaataataaaaggaaatgtaatatcgtaattattttactcaggaatggggttaaatatttatatcacgtgtatatctatactgttatcgtatactctttacaattactattacgaatatgcaagagataataagattacgtatttaagagaatcttgtcatgataattgggtacgacatagtgataaatgctatttcgcatcgttacataaagtcagttggaaagatggatttgacagatgtaacttaataggtgcaaaaatgttaaataacagcattctatcggaagataggataccagttatattatacaaaaatcactggttggataaaacagattctgcaatattcgtaaaagatgaagattactgcgaatttgtaaactatgacaataaaaagccatttatctcaacgacatcgtgtaattcttccatgttttatgtatgtgtttcagatattatgagattactataaactttttgtatacttatattccgtaaactatattaatcatgaagaaaatgaaaaagtatagaagctgttcacgagcggttgttgaaaacaacaaaattatacattcaagatggcttacatatacgtctgtgaggctatcatggataatgacaatgcatctctaaataggtttttggacaatggattcgaccctaacacggaatatggtactctacaatctcctcttgaaatggctgtaatgttcaagaataccgaggctataaaaatcttgatgaggtatggagctaaacctgtagttactgaatgcacaacttcttgtctgcatgatgcggtgttgagagacgactacaaaatagtgaaagatctgttgaagaataactatgtaaacaatgttctttacagcggaggctttactcctttgtgtttggcagcttaccttaacaaagttaatttggttaaacttctattggctcattcggcggatgtagatatttcaaacacggatcggttaactcctctacatatagccgtatcaaataaaaatttaacaatggttaaacttctattgaacaaaggtgctgatactgacttgctggataacatgggacgtactcctttaatgatcgctgtacaatctggaaatattgaaatatgtagcacactacttaaaaaaaataaaatgtccagaactgggaaaaattgatcttgccagctgtaattcatggtagaaaagaagtgctcaggctacttttcaacaaaggagcagatgtaaactacatctttgaaagaaatggaaaatcatatactgttttggaattgattaaagaaagttactctgagacacaaaagaggtagctgaagtggtactctcaaaggtacgtgactaattagctataaaaaggatccgggttaattaattagtcatcaggcagggcgagaacgagactatctgctcgttaattaattagagcttctttattctatacttaaaaagtgaaaataaatacaaaggttcttgagggttgtgttaaattgaaagcgagaaataatcataaattatttcattatcgcgatatccgttaagtttgtatcgtaatgaaattaaatactatcgcaatagccttcctgtattcctgtttctcacagtttttaaaaaatgtgtctgctctgaggcgtagttctccagatttgtcaccagatggttcttttcttcaagtaaaatcagcttctcctcaggataaacaagatgtaatccaaagttcctctcctaaggtaacagtgcctacggttgaccctgaaggcctcaagaaggcggttactgcagcagttctatcaaaccaaaatcaagctctacaaaacggtgctcttaatccagcagatttcactcaagctgcctctgttaattccatgagtaatgctgttagtgccatgaacaatactgttggtccagtaaaaaatcccatggctactgttggtactatgaactcctttactggaatgcctggtgtacaggataattttcctcagacaccgcctgttaatgttcaagacacctctacccaggagaacagtcttgacaacctaaatctcctcttagatccctcgttagtaaagatatctcaagctgatagtcacataaaagaaagcatggaaaaagctgtacacagccttaaaaaggtcttggaggggctaaccaaccttgcgactctgtctaaaagtagggatactgaaccgtttaatgttctgggggatgactatacgatgcgtaacgttttggacctcatgaataaggaactcaggcaggttgaatctcttcagaaagttgtgttccaattcaacgcctttgcactttccaccttcactaagagtccagacgataataaaaaatccctcgagtcctacataccatctgccgaaaagatcattcctaaccctttgctaggactagactgatttttctagaatcgatcccgggtttttatgactagttaatcacggccgcttataaagatctaaaatgcataatttctaaataatgaaaaaaagtacatcatgagcaacgcgttagtatattttacaatggagattaacgctctataccgttctatgtttattgattcagatgatgttttagaaaagaaagttattgaatatgaaaactttaatgaagatgaagatgacgacgatgattattgttgtaaatctgttttagatgaagaagatgacgcgctaaagtatactatggttacaaagtataagtctatactactaatggcgacttgtgcaagaaggtatagtatagtgaaaatgttgttagattatgattatgaaaaaccaaataaatcagatccatatctaaaggtatctcctttgcacataatttcatctattcctagtttagaatacttttcattatatttgtttacagctgaagacgaaaaaaatatatcgataatagaagattatgttaactctgctaataagatgaaattgaatgagtctgtgataatagctataatca

SEQ ID NO: 26 - protein, 285 aa, Theileria parva
MKLNTIAIAFLYSCFSQFLKNVSALRRSSPDLSPDGSFLQVKSASPQDKQDVIQSSSPKVTVPTVDPEGLKKAVTAAVLSNQNQALQNGALNPADFTQAASVNSMSNAVSAMNNTVGPVKNPMATVGTMNSFTGMPGVQDNFPQTPPVNVQDTSTQENSLDNLNLLLDPSLVKISQADSHIKESMEKAVHSLKKVLEGLTNLATLSKSRDTEPFNVLGDDYTMRNVLDLMNKELRQVESLQKVVFQFNAFALSTFTKSPDDNKKSLESYIPSAEKIIPNPLLGLD

SEQ ID NO: 27 - DNA, 54 bp, Artificial Sequence
  Description of Artificial Sequence: Synthetic primer
  CDS (31)..(54)
tatcgcgatatccgttaagtttgtatcgtaatgagtcatttaatgaacctacca

SEQ ID NO: 28 - DNA, 32 bp, Artificial Sequence
  Description of Artificial Sequence: Synthetic primer
gactcgagtttgggttgtggtagtgcgctttg

SEQ ID NO: 29 - DNA, 6671 bp, Theileria parva
gcgcccaatacgcaaaccgcctctccccgcgcgttggccgattcattaatgcagctggcacgacaggtttcccgactggaaagcgggcagtgagcgcaacgcaattaatgtgagttagctcactcattaggcaccccaggctttacactttatgcttccggctcgtatgttgtgtggaattgtgagcggataacaatttcacacaggaaacagctatgaccatgattacgaattgcggccgcaattctgaatgttaaatgttatactttggatgaagctataaatatgcattggaaaaataatccatttaaagaaaggattcaaatactacaaaacctaagcgataatatgttaactaagcttattcttaacgacgctttaaatatacacaaataaacataatttttgtataacctaacaaataactaaaacataaaaataataaaaggaaatgtaatatcgtaattattttactcaggaatggggttaaatatttatatcacgtgtatatctatactgttatcgtatactctttacaattactattacgaatatgcaagagataataagattacgtatttaagagaatcttgtcatgataattgggtacgacatagtgataaatgctatttcgcatcgttacataaagtcagttggaaagatggatttgacagatgtaacttaataggtgcaaaaatgttaaataacagcattctatcggaagataggataccagttatattatacaaaaatcactggttggataaaacagattctgcaatattcgtaaaagatgaagattactgcgaatttgtaaactatgacaataaaaagccatttatctcaacgacatcgtgtaattcttccatgttttatgtatgtgtttcagatattatgagattactataaactttttgtatacttatattccgtaaactatattaatcatgaagaaaatgaaaaagtatagaagctgttcacgagcggttgttgaaaacaacaaaattatacattcaagatggcttacatatacgtctgtgaggctatcatggataatgacaatgcatctctaaataggtttttggacaatggattcgaccctaacacggaatatggtactctacaatctcctcttgaaatggctgtaatgttcaagaataccgaggctataaaaatcttgatgaggtatggagctaaacctgtagttactgaatgcacaacttcttgtctgcatgatgcggtgttgagagacgactacaaaatagtgaaagatctgttgaagaataactatgtaaacaatgttctttacagcggaggctttactcctttgtgtttggcagcttaccttaacaaagttaatttggttaaacttctattggctcattcggcggatgtagatatttcaaacacggatcggttaactcctctacatatagccgtatcaaataaaaatttaacaatggttaaacttctattgaacaaaggtgctgatactgacttgctggataacatgggacgtactcctttaatgatcgctgtacaatctggaaatattgaaatatgtagcacactacttaaaaaaaataaaatgtccagaactgggaaaaattgatcttgccagctgtaattcatggtagaaaagaagtgctcaggctacttttcaacaaaggagcagatgtaaactacatctttgaaagaaatggaaaatcatatactgttttggaattgattaaagaaagttactctgagacacaaaagaggtagctgaagtggtactctcaaaggtacgtgactaattagctataaaaaggatccgggttaattaattagtcatcaggcagggcgagaacgagactatctgctcgttaattaattagagcttctttattctatacttaaaaagtgaaaataaatacaaaggttcttgagggttgtgttaaattgaaagcgagaaataatcataaattatttcattatcgcgatatccgttaagtttgtatcgtaatgagtcatttaatgaacctaccaatccttgtattgaaggaaggcactgatacatcccaaggccaagctcaaatcattagtaatatcaacgcctgtcaagctattgtcgattgtgttaaaactactctaggtcctagaggaatggacaagttgatacatacggagagagatgtgacgataaccaatgacggtgctactgttttgaaattacttgatattactcatcctgccgcttctgttcttgttgatatcgctaaatcacaagatgatgaagtcggtgatgggactacttccgttactgttctagcaggtgagttattgaatgaagctaaggcgtttatattggatgggataagtcctcaggttatcataaaatactatcgtgaagcctgtcaagttgctttaaatctcattgataaagttgccattcatctctccaacaaatcctcaactgataagaaagaactactgataaaatgtgctgaaactacttttaattcaaagttattgtctggttataaaaccttttttgccaagatggttgtggaggcagtggctactttggatgaggacttggatgaggatatgattggtgttaaaaaagtcactggtggttcctgtgaggactcactcctagtcaagggtgtagcattcaagaaaactttcagctacgctggggctgaacaacagccaaagaaattcgtcaatccaaagattttattacttaatttggaattggaactcaaatccgaaaaagaaaacgcagaaattgttatcaataatccacaagaatatcagaagataatagatgccgagtataggataatatttgagaagcttgagaatgcagtgaaactcggtgctaatgtagttttatctaaattgccaattggtgatttagcaacacaatactttgcagataaaaatgtattttgtgccggccgggttgatgaaaatgatcttataagaacgagtaaagctactggtgcttctattcaaaccactctcaataacctttcagttgacgtcttaggaacttgtggtgtgtttgaggaagtgcaaattgggtctgaacgttacaatatgttcacagattgcaagagtgcaaaaacctgtacaattgtgttgagaggtggaggtcagcagttcattgatgaatctgaacgttcactccatgacgcgattatgattgtcagaagagcaactaaatgtaatactatccttcccggagctggtgccattgagatgttgctctcaacttatctcctccactattctctcaacactattaatcccacagactctgtcaaccatgttaactgcgttaactccgtaaatcatgttaatggagttactggggtgaataagagtctggtgggtaagaggcacataataatgaacgggtttgcaaaggcattggagtgtattccaaggaatttagccactaattctggctacaattcaaatgatttattatcgatactaagaaataaatacaatcaattggaaatagtcaatggagagataaaggtgaataatgaggagagttggtatggaatagattgttacaagggaagtgtatgtaacgcatacaaggcttgtatttgggagccgagtttggtgaaaaaaaactcaatttactcagctactgaagcagcttgccttgtcctctcagttgatgaaactgtcaaaaaccaatccagacaacagttacaaagcgcactaccacaacccaaactcgagtcctacataccatctgccgaaaagatcattcctaaccctttgctaggactagactgatttttctagaatcgatcccgggtttttatgactagttaatcacggccgcttataaagatctaaaatgcataatttctaaataatgaaaaaaagtacatcatgagcaacgcgttagtatattttacaatggagattaacgctctataccgttctatgtttattgattcagatgatgttttagaaaagaaagttattgaatatgaaaactttaatgaagatgaagatgacgacgatgattattgttgtaaatctgttttagatgaagaagatgacgcgctaaagtatactatggttacaaagtataagtctatactactaatggcgacttgtgcaagaaggtatagtatagtgaaaatgttgttagattatgattatgaaaaaccaaataaatcagatccatatctaaaggtatctcctttgcacataatttcatctattcctagtttagaatacctgcagccaagcttggcactggccgtcgttttacaacgtcgtgactgggaaaaccctggcgttacccaacttaatcgccttgcagcacatccccctttcgccagctggcgtaatagcgaagaggcccgcaccgatcgcccttcccaacagttgcgcagcctgaatggcgaatggcgcctgatgcggtattttctccttacgcatctgtgcggtatttcacaccgcatatggtgcactctcagtacaatctgctctgatgccgcatagttaagccagccccgacacccgccaacacccgctgacgcgccctgacgggcttgtctgctcccggcatccgcttacagacaagctgtgaccgtctccgggagctgcatgtgtcagaggttttcaccgtcatcaccgaaacgcgcgagacgaaagggcctcgtgatacgcctatttttataggttaatgtcatgataataatggtttcttagacgtcaggtggcacttttcggggaaatgtgcgcggaacccctatttgtttatttttctaaatacattcaaatatgtatccgctcatgagacaataaccctgataaatgcttcaataatattgaaaaaggaagagtatgagtattcaacatttccgtgtcgcccttattcccttttttgcggcattttgccttcctgtttttgctcacccagaaacgctggtgaaagtaaaagatgctgaagatcagttgggtgcacgagtgggttacatcgaactggatctcaacagcggtaagatccttgagagttttcgccccgaagaacgttttccaatgatgagcacttttaaagttctgctatgtggcgcggtattatcccgtattgacgccgggcaagagcaactcggtcgccgcatacactattctcagaatgacttggttgagtactcaccagtcacagaaaagcatcttacggatggcatgacagtaagagaattatgcagtgctgccataaccatgagtgataacactgcggccaacttacttctgacaacgatcggaggaccgaaggagctaaccgcttttttgcacaacatgggggatcatgtaactcgccttgatcgttgggaaccggagctgaatgaagccataccaaacgacgagcgtgacaccacgatgcctgtagcaatggcaacaacgttgcgcaaactattaactggcgaactacttactctagcttcccggcaacaattaatagactggatggaggcggataaagttgcaggaccacttctgcgctcggcccttccggctggctggtttattgctgataaatctggagccggtgagcgtgggtctcgcggtatcattgcagcactggggccagatggtaagccctcccgtatcgtagttatctacacgacggggagtcaggcaactatggatgaacgaaatagacagatcgctgagataggtgcctcactgattaagcattggtaactgtcagaccaagtttactcatatatactttagattgatttaaaacttcatttttaatttaaaaggatctaggtgaagatcctttttgataatctcatgaccaaaatcccttaacgtgagttttcgttccactgagcgtcagaccccgtagaaaagatcaaaggatcttcttgagatcctttttttctgcgcgtaatctgctgcttgcaaacaaaaaaaccaccgctaccagcggtggtttgtttgccggatcaagagctaccaactctttttccgaaggtaactggcttcagcagagcgcagataccaaatactgtccttctagtgtagccgtagttaggccaccacttcaagaactctgtagcaccgcctacatacctcgctctgctaatcctgttaccagtggctgctgccagtggcgataagtcgtgtcttaccgggttggactcaagacgatagttaccggataaggcgcagcggtcgggctgaacggggggttcgtgcacacagcccagcttggagcgaacgacctacaccgaactgagatacctacagcgtgagctatgagaaagcgccacgcttcccgaagggagaaaggcggacaggtatccggtaagcggcagggtcggaacaggagagcgcacgagggagcttccagggggaaacgcctggtatctttatagtcctgtcgggtttcgccacctctgacttgagcgtcgatttttgtgatgctcgtcaggggggcggagcctatggaaaaacgccagcaacgcggcctttttacggttcctggccttttgctggccttttgctcacatgttctttcctgcgttatcccctgattctgtggataaccgtattaccgcctttgagtgagctgataccgctcgccgcagccgaacgaccgagcgcagcgagtcagtgagcgaggaagcggaaga

SEQ ID NO: 30 - protein, 599 aa, Theileria parva
MSHLMNLPILVLKEGTDTSQGQAQIISNINACQAIVDCVKTTLGPRGMDKLIHTERDVTITNDGATVLKLLDITHPAASVLVDIAKSQDDEVGDGTTSVTVLAGELLNEAKAFILDGISPQVIIKYYREACQVALNLIDKVAIHLSNKSSTDKKELLIKCAETTFNSKLLSGYKTFFAKMVVEAVATLDEDLDEDMIGVKKVTGGSCEDSLLVKGVAFKKTFSYAGAEQQPKKFVNPKILLLNLELELKSEKENAEIVINNPQEYQKIIDAEYRIIFEKLENAVKLGANVVLSKLPIGDLATQYFADKNVFCAGRVDENDLIRTSKATGASIQTTLNNLSVDVLGTCGVFEEVQIGSERYNMFTDCKSAKTCTIVLRGGGQQFIDESERSLHDAIMIVRRATKCNTILPGAGAIEMLLSTYLLHYSLNTINPTDSVNHVNCVNSVNHVNGVTGVNKSLVGKRHIIMNGFAKALECIPRNLATNSGYNSNDLLSILRNKYNQLEIVNGEIKVNNEESWYGIDCYKGSVCNAYKACIWEPSLVKKNSIYSATEAACLVLSVDETVKNQSRQQLQSALPQPKLESYIPSAEKIIPNPLLGLD

SEQ ID NO: 31 - DNA, 56 bp, Artificial Sequence
  Description of Artificial Sequence: Synthetic primer
  CDS (30)..(56)
atcgcgatatccgttaagtttgtatcgtaatgccgaaaaataaaggcaaaggagga

SEQ ID NO: 32 - protein, 175 aa, Theileria parva
MPKNKGKGGKNRRRGKNDNEGEKRELVFKMEDQEYAQVLRMLGNGRLEAYCFDGTKRLCHIRGKMRKRVWVNAGDIILVSLRDFQDSKADVIAKYTAEEARTLKAYGELPEATKINETDVYDDEADNCIDFQDVSSESEPEDESQEESDFDIDDLLESYIPSAEKIIPNPLLGLD

SEQ ID NO: 33 - DNA, 5399 bp, Theileria parva
gcgcccaatacgcaaaccgcctctccccgcgcgttggccgattcattaatgcagctggcacgacaggtttcccgactggaaagcgggcagtgagcgcaacgcaattaatgtgagttagctcactcattaggcaccccaggctttacactttatgcttccggctcgtatgttgtgtggaattgtgagcggataacaatttcacacaggaaacagctatgaccatgattacgaattgcggccgcaattctgaatgttaaatgttatactttggatgaagctataaatatgcattggaaaaataatccatttaaagaaaggattcaaatactacaaaacctaagcgataatatgttaactaagcttattcttaacgacgctttaaatatacacaaataaacataatttttgtataacctaacaaataactaaaacataaaaataataaaaggaaatgtaatatcgtaattattttactcaggaatggggttaaatatttatatcacgtgtatatctatactgttatcgtatactctttacaattactattacgaatatgcaagagataataagattacgtatttaagagaatcttgtcatgataattgggtacgacatagtgataaatgctatttcgcatcgttacataaagtcagttggaaagatggatttgacagatgtaacttaataggtgcaaaaatgttaaataacagcattctatcggaagataggataccagttatattatacaaaaatcactggttggataaaacagattctgcaatattcgtaaaagatgaagattactgcgaatttgtaaactatgacaataaaaagccatttatctcaacgacatcgtgtaattcttccatgttttatgtatgtgtttcagatattatgagattactataaactttttgtatacttatattccgtaaactatattaatcatgaagaaaatgaaaaagtatagaagctgttcacgagcggttgttgaaaacaacaaaattatacattcaagatggcttacatatacgtctgtgaggctatcatggataatgacaatgcatctctaaataggtttttggacaatggattcgaccctaacacggaatatggtactctacaatctcctcttgaaatggctgtaatgttcaagaataccgaggctataaaaatcttgatgaggtatggagctaaacctgtagttactgaatgcacaacttcttgtctgcatgatgcggtgttgagagacgactacaaaatagtgaaagatctgttgaagaataactatgtaaacaatgttctttacagcggaggctttactcctttgtgtttggcagcttaccttaacaaagttaatttggttaaacttctattggctcattcggcggatgtagatatttcaaacacggatcggttaactcctctacatatagccgtatcaaataaaaatttaacaatggttaaacttctattgaacaaaggtgctgatactgacttgctggataacatgggacgtactcctttaatgatcgctgtacaatctggaaatattgaaatatgtagcacactacttaaaaaaaataaaatgtccagaactgggaaaaattgatcttgccagctgtaattcatggtagaaaagaagtgctcaggctacttttcaacaaaggagcagatgtaaactacatctttgaaagaaatggaaaatcatatactgttttggaattgattaaagaaagttactctgagacacaaaagaggtagctgaagtggtactctcaaaggtacgtgactaattagctataaaaaggatccgggttaattaattagtcatcaggcagggcgagaacgagactatctgctcgttaattaattagagcttctttattctatacttaaaaagtgaaaataaatacaaaggttcttgagggttgtgttaaattgaaagcgagaaataatcataaattatttcattatcgcgatatccgttaagtttgtatcgtaatgccgaaaaataaaggcaaaggaggaaagaaccggagacgcggtaaaaatgacaatgaaggcgaaaaaagagaattagtcttcaaaatggaagatcaagaatatgctcaagttttacgtatgctcggtaatggcagacttgaagcctactgttttgacggcactaaacgtctttgccatattagaggaaagatgaggaagcgagtttgggtaaatgccggcgatattattttggtatcgcttagagatttccaggacagcaaggctgacgtgatcgcaaagtacactgctgaggaggctcgtactctgaaggcttacggcgagttgcctgaagcgaccaaaatcaacgaaactgacgtgtacgacgacgaggccgacaactgcattgacttccaggacgtatcgtctgaatcagaacctgaggatgagtcacaagaggagtcggatttcgatatcgatgatttactcgagtcctacataccatctgccgaaaagatcattcctaaccctttgctaggactagactgatttttctagaatcgatcccgggtttttatgactagttaatcacggccgcttataaagatctaaaatgcataatttctaaataatgaaaaaaagtacatcatgagcaacgcgttagtatattttacaatggagattaacgctctataccgttctatgtttattgattcagatgatgttttagaaaagaaagttattgaatatgaaaactttaatgaagatgaagatgacgacgatgattattgttgtaaatctgttttagatgaagaagatgacgcgctaaagtatactatggttacaaagtataagtctatactactaatggcgacttgtgcaagaaggtatagtatagtgaaaatgttgttagattatgattatgaaaaaccaaataaatcagatccatatctaaaggtatctcctttgcacataatttcatctattcctagtttagaatacctgcagccaagcttggcactggccgtcgttttacaacgtcgtgactgggaaaaccctggcgttacccaacttaatcgccttgcagcacatccccctttcgccagctggcgtaatagcgaagaggcccgcaccgatcgcccttcccaacagttgcgcagcctgaatggcgaatggcgcctgatgcggtattttctccttacgcatctgtgcggtatttcacaccgcatatggtgcactctcagtacaatctgctctgatgccgcatagttaagccagccccgacacccgccaacacccgctgacgcgccctgacgggcttgtctgctcccggcatccgcttacagacaagctgtgaccgtctccgggagctgcatgtgtcagaggttttcaccgtcatcaccgaaacgcgcgagacgaaagggcctcgtgatacgcctatttttataggttaatgtcatgataataatggtttcttagacgtcaggtggcacttttcggggaaatgtgcgcggaacccctatttgtttatttttctaaatacattcaaatatgtatccgctcatgagacaataaccctgataaatgcttcaataatattgaaaaaggaagagtatgagtattcaacatttccgtgtcgcccttattcccttttttgcggcattttgccttcctgtttttgctcacccagaaacgctggtgaaagtaaaagatgctgaagatcagttgggtgcacgagtgggttacatcgaactggatctcaacagcggtaagatccttgagagttttcgccccgaagaacgttttccaatgatgagcacttttaaagttctgctatgtggcgcggtattatcccgtattgacgccgggcaagagcaactcggtcgccgcatacactattctcagaatgacttggttgagtactcaccagtcacagaaaagcatcttacggatggcatgacagtaagagaattatgcagtgctgccataaccatgagtgataacactgcggccaacttacttctgacaacgatcggaggaccgaaggagctaaccgcttttttgcacaacatgggggatcatgtaactcgccttgatcgttgggaaccggagctgaatgaagccataccaaacgacgagcgtgacaccacgatgcctgtagcaatggcaacaacgttgcgcaaactattaactggcgaactacttactctagcttcccggcaacaattaatagactggatggaggcggataaagttgcaggaccacttctgcgctcggcccttccggctggctggtttattgctgataaatctggagccggtgagcgtgggtctcgcggtatcattgcagcactggggccagatggtaagccctcccgtatcgtagttatctacacgacggggagtcaggcaactatggatgaacgaaatagacagatcgctgagataggtgcctcactgattaagcattggtaactgtcagaccaagtttactcatatatactttagattgatttaaaacttcatttttaatttaaaaggatctaggtgaagatcctttttgataatctcatgaccaaaatcccttaacgtgagttttcgttccactgagcgtcagaccccgtagaaaagatcaaaggatcttcttgagatcctttttttctgcgcgtaatctgctgcttgcaaacaaaaaaaccaccgctaccagcggtggtttgtttgccggatcaagagctaccaactctttttccgaaggtaactggcttcagcagagcgcagataccaaatactgtccttctagtgtagccgtagttaggccaccacttcaagaactctgtagcaccgcctacatacctcgctctgctaatcctgttaccagtggctgctgccagtggcgataagtcgtgtcttaccgggttggactcaagacgatagttaccggataaggcgcagcggtcgggctgaacggggggttcgtgcacacagcccagcttggagcgaacgacctacaccgaactgagatacctacagcgtgagctatgagaaagcgccacgcttcccgaagggagaaaggcggacaggtatccggtaagcggcagggtcggaacaggagagcgcacgagggagcttccagggggaaacgcctggtatctttatagtcctgtcgggtttcgccacctctgacttgagcgtcgatttttgtgatgctcgtcaggggggcggagcctatggaaaaacgccagcaacgcggcctttttacggttcctggccttttgctggccttttgctcacatgttctttcctgcgttatcccctgattctgtggataaccgtattaccgcctttgagtgagctgataccgctcgccgcagccgaacgaccgagcgcagcgagtcagtgagcgaggaagcggaaga

SEQ ID NO: 34 - DNA, 24 bp, Artificial Sequence
  Description of Artificial Sequence: Synthetic primer
gtctagtcctagcaaagggttagg

SEQ ID NO: 35 - DNA, 24 bp, Artificial Sequence
  Description of Artificial Sequence: Synthetic primer
gctcggtaatggcagacttgaagc

SEQ ID NO: 36 - DNA, 2978 bp, Theileria parva
gaatctgttagttagttacttggataaattaatcgagacgcgtgataaaatgactatgtaccgttattgcatgaacgatattataaatataggttctcgtaggagagaactattgactatggcaatgaatgttaaatgttatactttggatgaagctataaatatgcattggaaaaataatccatttaaagaaaggattcaaatactacaaaacctaagcgataatatgttaactaagcttattcttaacgacgctttaaatatacacaaataaacataatttttgtataacctaacaaataactaaaacataaaaataataaaaggaaatgtaatatcgtaattattttactcaggaatggggttaaatatttatatcacgtgtatatctatactgttatcgtatactctttacaattactattacgaatatgcaagagataataagattacgtatttaagagaatcttgtcatgataattgggtacgacatagtgataaatgctatttcgcatcgttacataaagtcagttggaaagatggatttgacagatgtaacttaataggtgcaaaaatgttaaataacagcattctatcggaagataggataccagttatattatacaaaaatcactggttggataaaacagattctgcaatattcgtaaaagatgaagattactgcgaatttgtaaactatgacaataaaaagccatttatctcaacgacatcgtgtaattcttccatgttttatgtatgtgtttcagatattatgagattactataaactttttgtatacttatattccgtaaactatattaatcatgaagaaaatgaaaaagtatagaagctgttcacgagcggttgttgaaaacaacaaaattatacattcaagatggcttacatatacgtctgtgaggctatcatggataatgacaatgcatctctaaataggtttttggacaatggattcgaccctaacacggaatatggtactctacaatctcctcttgaaatggctgtaatgttcaagaataccgaggctataaaaatcttgatgaggtatggagctaaacctgtagttactgaatgcacaacttcttgtctgcatgatgcggtgttgagagacgactacaaaatagtgaaagatctgttgaagaataactatgtaaacaatgttctttacagcggaggctttactcctttgtgtttggcagcttaccttaacaaagttaatttggttaaacttctattggctcattcggcggatgtagatatttcaaacacggatcggttaactcctctacatatagccgtatcaaataaaaatttaacaatggttaaacttctattgaacaaaggtgctgatactgacttgctggataacatgggacgtactcctttaatgatcgctgtacaatctggaaatattgaaatatgtagcacactacttaaaaaaaataaaatgtccagaactgggaaaaattgatcttgccagctgtaattcatggtagaaaagaagtgctcaggctacttttcaacaaaggagcagatgtaaactacatctttgaaagaaatggaaaatcatatactgttttggaattgattaaagaaagttactctgagacacaaaagaggtagctgaagtggtactctcaaaggtacgtgactaattagctataaaaaggatccgggttaattaattagtcatcaggcagggcgagaacgagactatctgctcgttaattaattagagcttctttattctatacttaaaaagtgaaaataaatacaaaggttcttgagggttgtgttaaattgaaagcgagaaataatcataaattatttcattatcgcgatatccgttaagtttgtatcgtaatgccgaaaaataaaggcaaaggaggaaagaaccggagacgcggtaaaaatgacaatgaaggcgaaaaaagagaattagtcttcaaaatggaagatcaagaatatgctcaagttttacgtatgctcggtaatggcagacttgaagcctactgttttgacggcactaaacgtctttgccatattagaggaaagatgaggaagcgagtttgggtaaatgccggcgatattattttggtatcgcttagagatttccaggacagcaaggctgacgtgatcgcaaagtacactgctgaggaggctcgtactctgaaggcttacggcgagttgcctgaagcgaccaaaatcaacgaaactgacgtgtacgacgacgaggccgacaactgcattgacttccaggacgtatcgtctgaatcagaacctgaggatgagtcacaagaggagtcggatttcgatatcgatgatttactcgagtcctacataccatctgccgaaaagatcattcctaaccctttgctaggactagactgatttttctagaatcgatcccgggtttttatgactagttaatcacggccgcttataaagatctaaaatgcataatttctaaataatgaaaaaaagtacatcatgagcaacgcgttagtatattttacaatggagattaacgctctataccgttctatgtttattgattcagatgatgttttagaaaagaaagttattgaatatgaaaactttaatgaagatgaagatgacgacgatgattattgttgtaaatctgttttagatgaagaagatgacgcgctaaagtatactatggttacaaagtataagtctatactactaatggcgacttgtgcaagaaggtatagtatagtgaaaatgttgttagattatgattatgaaaaaccaaataaatcagatccatatctaaaggtatctcctttgcacataatttcatctattcctagtttagaatacttttcattatatttgtttacagctgaagacgaaaaaaatatatcgataatagaagattatgttaactctgctaataagatgaaattgaatgagtctgtgataatagctataatca

SEQ ID NO: 37 - DNA, 50 bp, Artificial Sequence
  Description of Artificial Sequence: Synthetic primer
  CDS (30)..(50)
atcgcgatatccgttaagtttgtatcgtaatggctcagattcctgttgat

SEQ ID NO: 38 - DNA, 3400 bp, Theileria parva
  CDS (2005)..(2895)
gcgcccaatacgcaaaccgcctctccccgcgcgttggccgattcattaatgcagctggcacgacaggtttcccgactggaaagcgggcagtgagcgcaacgcaattaatgtgagttagctcactcattaggcaccccaggctttacactttatgcttccggctcgtatgttgtgtggaattgtgagcggataacaatttcacacaggaaacagctatgaccatgattacgaattgcggccgcaattctgaatgttaaatgttatactttggatgaagctataaatatgcattggaaaaataatccatttaaagaaaggattcaaatactacaaaacctaagcgataatatgttaactaagcttattcttaacgacgctttaaatatacacaaataaacataatttttgtataacctaacaaataactaaaacataaaaataataaaaggaaatgtaatatcgtaattattttactcaggaatggggttaaatatttatatcacgtgtatatctatactgttatcgtatactctttacaattactattacgaatatgcaagagataataagattacgtatttaagagaatcttgtcatgataattgggtacgacatagtgataaatgctatttcgcatcgttacataaagtcagttggaaagatggatttgacagatgtaacttaataggtgcaaaaatgttaaataacagcattctatcggaagataggataccagttatattatacaaaaatcactggttggataaaacagattctgcaatattcgtaaaagatgaagattactgcgaatttgtaaactatgacaataaaaagccatttatctcaacgacatcgtgtaattcttccatgttttatgtatgtgtttcagatattatgagattactataaactttttgtatacttatattccgtaaactatattaatcatgaagaaaatgaaaaagtatagaagctgttcacgagcggttgttgaaaacaacaaaattatacattcaagatggcttacatatacgtctgtgaggctatcatggataatgacaatgcatctctaaataggtttttggacaatggattcgaccctaacacggaatatggtactctacaatctcctcttgaaatggctgtaatgttcaagaataccgaggctataaaaatcttgatgaggtatggagctaaacctgtagttactgaatgcacaacttcttgtctgcatgatgcggtgttgagagacgactacaaaatagtgaaagatctgttgaagaataactatgtaaacaatgttctttacagcggaggctttactcctttgtgtttggcagcttaccttaacaaagttaatttggttaaacttctattggctcattcggcggatgtagatatttcaaacacggatcggttaactcctctacatatagccgtatcaaataaaaatttaacaatggttaaacttctattgaacaaaggtgctgatactgacttgctggataacatgggacgtactcctttaatgatcgctgtacaatctggaaatattgaaatatgtagcacactacttaaaaaaaataaaatgtccagaactgggaaaaattgatcttgccagctgtaattcatggtagaaaagaagtgctcaggctacttttcaacaaaggagcagatgtaaactacatctttgaaagaaatggaaaatcatatactgttttggaattgattaaagaaagttactctgagacacaaaagaggtagctgaagtggtactctcaaaggtacgtgactaattagctataaaaaggatccgggttaattaattagtcatcaggcagggcgagaacgagactatctgctcgttaattaattagagcttctttattctatacttaaaaagtgaaaataaatacaaaggttcttgagggttgtgttaaattgaaagcgagaaataatcataaattatttcattatcgcgatatccgttaagtttgtatcgtaatggctcagattcctgttgataaattcgctaaattagttactggagccggctctgctcttttattattcggttcaggtgcctggcttgtcaattccagtttatacgatgttggagctgggcatagagctgttgtatataaccgtatcactggaataagtgagactacacatggagaaggaacgcacttcataattccctggctagaacgtccaataatttacgatgtgaggactcgtcctaggactctgatgtctctcaccggaagccgtgacttgcagatggttaacatcacctgccgtgtgttgtctcgtcccgatgagcgcagactcagggatatttacaggcacttgggcaaagattacgacgagcgagtcctgccttcaataataaacgaggttctgaagagtattgtggcccagtacaacgcctctcagctcattactcagagagaaagagttagcaaagcagtcagggaccagctggtgaacagggccagggactttaatattcttctcgatgatgtctccttaacccacttaagcttcagtcctgaatatgaaaaggctgtagaggctaaacaagtagctcaacagcaagctgaacgcagtaaatatatagtgttgaaggctcaggaggagaagaaatcgacgataattaaggctcagggagagtctgaggctgcaaggcttattggaagtgcaattaaggataaccctgcctttattacgcttcggagaattgaaaccgctaaggaagtggctaacattctctccaaatcgcagaataaaatcatgctcaatagtaatactctcttactctcaactgataaactcgagtcctacataccatctgccgaaaagatcattcctaaccctttgctaggactagactgatttttctagaatcgatcccgggtttttatgactagttaatcacggccgcttataaagatctaaaatgcataatttctaaataatgaaaaaaagtacatcatgagcaacgcgttagtatattttacaatggagattaacgctctataccgttctatgtttattgattcagatgatgttttagaaaagaaagttattgaatatgaaaactttaatgaagatgaagatgacgacgatgattattgttgtaaatctgttttagatgaagaagatgacgcgctaaagtatactatggttacaaagtataagtctatactactaatggcgacttgtgcaagaaggtatagtatagtgaaaatgttgttagattatgattatgaaaaaccaaataaatcagatccatatctaaaggtatctcctttgcacataatttcatctattcctagtttagaatacctgcagccaagcttggcactggccgtcgttttacaacgtcgtgactggg

SEQ ID NO: 39 - protein, 297 aa, Theileria parva
MAQIPVDKFAKLVTGAGSALLLFGSGAWLVNSSLYDVGAGHRAVVYNRITGISETTHGEGTHFIIPWLERPIIYDVRTRPRTLMSLTGSRDLQMVNITCRVLSRPDERRLRDIYRHLGKDYDERVLPSIINEVLKSIVAQYNASQLITQRERVSKAVRDQLVNRARDFNILLDDVSLTHLSFSPEYEKAVEAKQVAQQQAERSKYIVLKAQEEKKSTIIKAQGESEAARLIGSAIKDNPAFITLRRIETAKEVANILSKSQNKIMLNSNTLLLSTDKLESYIPSAEKIIPNPLLGLD

SEQ ID NO: 40 - DNA, 5765 bp, Theileria parva
gcgcccaatacgcaaaccgcctctccccgcgcgttggccgattcattaatgcagctggcacgacaggtttcccgactggaaagcgggcagtgagcgcaacgcaattaatgtgagttagctcactcattaggcaccccaggctttacactttatgcttccggctcgtatgttgtgtggaattgtgagcggataacaatttcacacaggaaacagctatgaccatgattacgaattgcggccgcaattctgaatgttaaatgttatactttggatgaagctataaatatgcattggaaaaataatccatttaaagaaaggattcaaatactacaaaacctaagcgataatatgttaactaagcttattcttaacgacgctttaaatatacacaaataaacataatttttgtataacctaacaaataactaaaacataaaaataataaaaggaaatgtaatatcgtaattattttactcaggaatggggttaaatatttatatcacgtgtatatctatactgttatcgtatactctttacaattactattacgaatatgcaagagataataagattacgtatttaagagaatcttgtcatgataattgggtacgacatagtgataaatgctatttcgcatcgttacataaagtcagttggaaagatggatttgacagatgtaacttaataggtgcaaaaatgttaaataacagcattctatcggaagataggataccagttatattatacaaaaatcactggttggataaaacagattctgcaatattcgtaaaagatgaagattactgcgaatttgtaaactatgacaataaaaagccatttatctcaacgacatcgtgtaattcttccatgttttatgtatgtgtttcagatattatgagattactataaactttttgtatacttatattccgtaaactatattaatcatgaagaaaatgaaaaagtatagaagctgttcacgagcggttgttgaaaacaacaaaattatacattcaagatggcttacatatacgtctgtgaggctatcatggataatgacaatgcatctctaaataggtttttggacaatggattcgaccctaacacggaatatggtactctacaatctcctcttgaaatggctgtaatgttcaagaataccgaggctataaaaatcttgatgaggtatggagctaaacctgtagttactgaatgcacaacttcttgtctgcatgatgcggtgttgagagacgactacaaaatagtgaaagatctgttgaagaataactatgtaaacaatgttctttacagcggaggctttactcctttgtgtttggcagcttaccttaacaaagttaatttggttaaacttctattggctcattcggcggatgtagatatttcaaacacggatcggttaactcctctacatatagccgtatcaaataaaaatttaacaatggttaaacttctattgaacaaaggtgctgatactgacttgctggataacatgggacgtactcctttaatgatcgctgtacaatctggaaatattgaaatatgtagcacactacttaaaaaaaataaaatgtccagaactgggaaaaattgatcttgccagctgtaattcatggtagaaaagaagtgctcaggctacttttcaacaaaggagcagatgtaaactacatctttgaaagaaatggaaaatcatatactgttttggaattgattaaagaaagttactctgagacacaaaagaggtagctgaagtggtactctcaaaggtacgtgactaattagctataaaaaggatccgggttaattaattagtcatcaggcagggcgagaacgagactatctgctcgttaattaattagagcttctttattctatacttaaaaagtgaaaataaatacaaaggttcttgagggttgtgttaaattgaaagcgagaaataatcataaattatttcattatcgcgatatccgttaagtttgtatcgtaatggctcagattcctgttgataaattcgctaaattagttactggagccggctctgctcttttattattcggttcaggtgcctggcttgtcaattccagtttatacgatgttggagctgggcatagagctgttgtatataaccgtatcactggaataagtgagactacacatggagaaggaacgcacttcataattccctggctagaacgtccaataatttacgatgtgaggactcgtcctaggactctgatgtctctcaccggaagccgtgacttgcagatggttaacatcacctgccgtgtgttgtctcgtcccgatgagcgcagactcagggatatttacaggcacttgggcaaagattacgacgagcgagtcctgccttcaataataaacgaggttctgaagagtattgtggcccagtacaacgcctctcagctcattactcagagagaaagagttagcaaagcagtcagggaccagctggtgaacagggccagggactttaatattcttctcgatgatgtctccttaacccacttaagcttcagtcctgaatatgaaaaggctgtagaggctaaacaagtagctcaacagcaagctgaacgcagtaaatatatagtgttgaaggctcaggaggagaagaaatcgacgataattaaggctcagggagagtctgaggctgcaaggcttattggaagtgcaattaaggataaccctgcctttattacgcttcggagaattgaaaccgctaaggaagtggctaacattctctccaaatcgcagaataaaatcatgctcaatagtaatactctcttactctcaactgataaactcgagtcctacataccatctgccgaaaagatcattcctaaccctttgctaggactagactgatttttctagaatcgatcccgggtttttatgactagttaatcacggccgcttataaagatctaaaatgcataatttctaaataatgaaaaaaagtacatcatgagcaacgcgttagtatattttacaatggagattaacgctctataccgttctatgtttattgattcagatgatgttttagaaaagaaagttattgaatatgaaaactttaatgaagatgaagatgacgacgatgattattgttgtaaatctgttttagatgaagaagatgacgcgctaaagtatactatggttacaaagtataagtctatactactaatggcgacttgtgcaagaaggtatagtatagtgaaaatgttgttagattatgattatgaaaaaccaaataaatcagatccatatctaaaggtatctcctttgcacataatttcatctattcctagtttagaatacctgcagccaagcttggcactggccgtcgttttacaacgtcgtgactgggaaaaccctggcgttacccaacttaatcgccttgcagcacatccccctttcgccagctggcgtaatagcgaagaggcccgcaccgatcgcccttcccaacagttgcgcagcctgaatggcgaatggcgcctgatgcggtattttctccttacgcatctgtgcggtatttcacaccgcatatggtgcactctcagtacaatctgctctgatgccgcatagttaagccagccccgacacccgccaacacccgctgacgcgccctgacgggcttgtctgctcccggcatccgcttacagacaagctgtgaccgtctccgggagctgcatgtgtcagaggttttcaccgtcatcaccgaaacgcgcgagacgaaagggcctcgtgatacgcctatttttataggttaatgtcatgataataatggtttcttagacgtcaggtggcacttttcggggaaatgtgcgcggaacccctatttgtttatttttctaaatacattcaaatatgtatccgctcatgagacaataaccctgataaatgcttcaataatattgaaaaaggaagagtatgagtattcaacatttccgtgtcgcccttattcccttttttgcggcattttgccttcctgtttttgctcacccagaaacgctggtgaaagtaaaagatgctgaagatcagttgggtgcacgagtgggttacatcgaactggatctcaacagcggtaagatccttgagagttttcgccccgaagaacgttttccaatgatgagcacttttaaagttctgctatgtggcgcggtattatcccgtattgacgccgggcaagagcaactcggtcgccgcatacactattctcagaatgacttggttgagtactcaccagtcacagaaaagcatcttacggatggcatgacagtaagagaattatgcagtgctgccataaccatgagtgataacactgcggccaacttacttctgacaacgatcggaggaccgaaggagctaaccgcttttttgcacaacatgggggatcatgtaactcgccttgatcgttgggaaccggagctgaatgaagccataccaaacgacgagcgtgacaccacgatgcctgtagcaatggcaacaacgttgcgcaaactattaactggcgaactacttactctagcttcccggcaacaattaatagactggatggaggcggataaagttgcaggaccacttctgcgctcggcccttccggctggctggtttattgctgataaatctggagccggtgagcgtgggtctcgcggtatcattgcagcactggggccagatggtaagccctcccgtatcgtagttatctacacgacggggagtcaggcaactatggatgaacgaaatagacagatcgctgagataggtgcctcactgattaagcattggtaactgtcagaccaagtttactcatatatactttagattgatttaaaacttcatttttaatttaaaaggatctaggtgaagatcctttttgataatctcatgaccaaaatcccttaacgtgagttttcgttccactgagcgtcagaccccgtagaaaagatcaaaggatcttcttgagatcctttttttctgcgcgtaatctgctgcttgcaaacaaaaaaaccaccgctaccagcggtggtttgtttgccggatcaagagctaccaactctttttccgaaggtaactggcttcagcagagcgcagataccaaatactgtccttctagtgtagccgtagttaggccaccacttcaagaactctgtagcaccgcctacatacctcgctctgctaatcctgttaccagtggctgctgccagtggcgataagtcgtgtcttaccgggttggactcaagacgatagttaccggataaggcgcagcggtcgggctgaacggggggttcgtgcacacagcccagcttggagcgaacgacctacaccgaactgagatacctacagcgtgagctatgagaaagcgccacgcttcccgaagggagaaaggcggacaggtatccggtaagcggcagggtcggaacaggagagcgcacgagggagcttccagggggaaacgcctggtatctttatagtcctgtcgggtttcgccacctctgacttgagcgtcgatttttgtgatgctcgtcaggggggcggagcctatggaaaaacgccagcaacgcggcctttttacggttcctggccttttgctggccttttgctcacatgttctttcctgcgttatcccctgattctgtggataaccgtattaccgcctttgagtgagctgataccgctcgccgcagccgaacgaccgagcgcagcgagtcagtgagcgaggaagcggaaga

SEQ ID NO: 41 - DNA, 24 bp, Artificial Sequence
  Description of Artificial Sequence: Synthetic primer
gttctttacaaggttgcagtcgag

SEQ ID NO: 42 - DNA, 32 bp, Artificial Sequence
  Description of Artificial Sequence: Synthetic primer
gactcgagaactgcgtacactgcgaaggaggt

SEQ ID NO: 43 - DNA, 3833 bp, Theileria parva
  CDS (1883)..(3262)
gaatctgttagttagttacttggataaattaatcgagacgcgtgataaaatgactatgtaccgttattgcatgaacgatattataaatataggttctcgtaggagagaactattgactatggcaatgaatgttaaatgttatactttggatgaagctataaatatgcattggaaaaataatccatttaaagaaaggattcaaatactacaaaacctaagcgataatatgttaactaagcttattcttaacgacgctttaaatatacacaaataaacataatttttgtataacctaacaaataactaaaacataaaaataataaaaggaaatgtaatatcgtaattattttactcaggaatggggttaaatatttatatcacgtgtatatctatactgttatcgtatactctttacaattactattacgaatatgcaagagataataagattacgtatttaagagaatcttgtcatgataattgggtacgacatagtgataaatgctatttcgcatcgttacataaagtcagttggaaagatggatttgacagatgtaacttaataggtgcaaaaatgttaaataacagcattctatcggaagataggataccagttatattatacaaaaatcactggttggataaaacagattctgcaatattcgtaaaagatgaagattactgcgaatttgtaaactatgacaataaaaagccatttatctcaacgacatcgtgtaattcttccatgttttatgtatgtgtttcagatattatgagattactataaactttttgtatacttatattccgtaaactatattaatcatgaagaaaatgaaaaagtatagaagctgttcacgagcggttgttgaaaacaacaaaattatacattcaagatggcttacatatacgtctgtgaggctatcatggataatgacaatgcatctctaaataggtttttggacaatggattcgaccctaacacggaatatggtactctacaatctcctcttgaaatggctgtaatgttcaagaataccgaggctataaaaatcttgatgaggtatggagctaaacctgtagttactgaatgcacaacttcttgtctgcatgatgcggtgttgagagacgactacaaaatagtgaaagatctgttgaagaataactatgtaaacaatgttctttacagcggaggctttactcctttgtgtttggcagcttaccttaacaaagttaatttggttaaacttctattggctcattcggcggatgtagatatttcaaacacggatcggttaactcctctacatatagccgtatcaaataaaaatttaacaatggttaaacttctattgaacaaaggtgctgatactgacttgctggataacatgggacgtactcctttaatgatcgctgtacaatctggaaatattgaaatatgtagcacactacttaaaaaaaataaaatgtccagaactgggaaaaattgatcttgccagctgtaattcatggtagaaaagaagtgctcaggctacttttcaacaaaggagcagatgtaaactacatctttgaaagaaatggaaaatcatatactgttttggaattgattaaagaaagttactctgagacacaaaagaggtagctgaagtggtactctcaaaggtacgtgactaattagctataaaaaggatccgggttaattaattagtcatcaggcagggcgagaacgagactatctgctcgttaattaattagagcttctttattctatacttaaaaagtgaaaataaatacaaaggttcttgagggttgtgttaaattgaaagcgagaaataatcataaattatttcattatcgcgatatccgttaagtttgtatcgtaatgcttggaaatcatgtcatgggatctaattccccccacattaaaattttatcatctgttacattcttacatattgctaaaatggaagaagtagaaaacgtaaaagtcgacgccttggagcgtgttgacactgagtctgtccttaattatgacactgtgttagaaaagaaaccattgcgcagcagtgttgcctctttcttcaaaagatacagtgctgttctcgtaatattaactgccgtgctattattcacattcacttttgcagcaatagcattgtcatcaggcagaagcgcaatcagaaagaacagagaactcctgtcagtcgaatttgaaaagcttcagttcgataatttcgtgacaattaagggagaaagggaagaggacttccccaagatggtagctgaagttctttacaaggttgcagtcgagtttgacccaaaagaagaggccttgatctacgtccagttcaatgacttcaacaagcaacacgacaagaagcacaacaattacaggcacaagaagacctcgtacaccaacttcagaaacaaccttaatgatataaacgagcacaacgcaaaaccaaacctgtcgtacaccaagaacatgaaccacttcggtgacatatcatccaaggatttcatgaagagatacaccaagaaagtactcttgaacttgccaaaagaccacgtgtccacctataacaacaacagaccaatgtcagttgatctcagaagccatggtgtattgactccagtcaagtgccaagaagaaaatgaactctcatggccatactccgtagtagcagtcgccgagtcattcgttaagaagacatcacaaaagaccgtatccctcagcgaaaaacaattagtagattgcgttacagataagaaatctgcaaacaacccattcttgggttacaaataccttaaggacttgggtctgttcgaatcagaactcgtagacaaatccacaaccaagtgcccagcattggaaggtgaaagattcaaagtcccatcatactcatactcatatgagccagatttggtggcactcttgttgaatgcaggaccactcactgtaccagttgcagtgagcgaggattggcaattctacgctgatggaaccttggatgtatgcggtgctgaattgaaccacttcttgaccctagtaggtgtcagctttgacgaaaaaggcaatcactggatactcaaaaactcattcggtgaaggctggggaaacaagggatacctactgttgactcgcaatagcaaggaatacaaagatgattgtggattgacctccttcgcagtgtacgcagttctcgagtcctacataccatctgccgaaaagatcattcctaaccctttgctaggactagactgatttttctagaatcgatcccgggtttttatgactagttaatcacggccgcttataaagatctaaaatgcataatttctaaataatgaaaaaaagtacatcatgagcaacgcgttagtatattttacaatggagattaacgctctataccgttctatgtttattgattcagatgatgttttagaaaagaaagttattgaatatgaaaactttaatgaagatgaagatgacgacgatgattattgttgtaaatctgttttagatgaagaagatgacgcgctaaagtatactatggttacaaagtataagtctatactactaatggcgacttgtgcaagaaggtatagtatagtgaaaatgttgttagattatgattatgaaaaaccaaataaatcagatccatatctaaaggtatctcctttgcacataatttcatctattcctagtttagaatacttttcattatatttgtttacagctgaagacgaaaaaaatatatcgataatagaagattatgttaactctgctaataagatgaaattgaatgagtctgtgataatagctataatca

SEQ ID NO: 44 - protein, 460 aa, Theileria parva
MLGNHVMGSNSPHIKILSSVTFLHIAKMEEVENVKVDALERVDTESVLNYDTVLEKKPLRSSVASFFKRYSAVLVILTAVLLFTFTFAAIALSSGRSAIRKNRELLSVEFEKLQFDNFVTIKGEREEDFPKMVAEVLYKVAVEFDPKEEALIYVQFNDFNKQHDKKHNNYRHKKTSYTNFRNNLNDINEHNAKPNLSYTKNMNHFGDISSKDFMKRYTKKVLLNLPKDHVSTYNNNRPMSVDLRSHGVLTPVKCQEENELSWPYSVVAVAESFVKKTSQKTVSLSEKQLVDCVTDKKSANNPFLGYKYLKDLGLFESELVDKSTTKCPALEGERFKVPSYSYSYEPDLVALLLNAGPLTVPVAVSEDWQFYADGTLDVCGAELNHFLTLVGVSFDEKGNHWILKNSFGEGWGNKGYLLLTRNSKEYKDDCGLTSFAVYAVLESYIPSAEKIIPNPLLGLD

SEQ ID NO: 45 - protein, 543 aa, Theileria parva
MRVKKVLLYTLPVVGILLAGSLIIFNFVRKRPEKEEELKPPSALEDELKKREEESRKRMEEMQKEILEKKLREGKKALEELEKREKEVVDEFAKHLKKPEERLPKIILTLDSGFPTVDPITYTSGVYMVAVSKTTFTSDSDLVDFTHTLLGIKFLVTGVQFGGKTYTIKPIEATMATSIAFAADPGFCYFLLIPGPDSKPIFFKNDGDKFLRCVGYPKVKEEMLEMATKFNRLPKGVEIPAPPGVKPEAPTPTPTTITPSVPPTIPTPITPSAPPTTPPTGLNFNLTVQNKFMIGSQEVKLNITHEYEGVYEAHKYFIERGSFTPTSFSIGDLPQTGLPVNQTVDTIVVYFHRVTMGEPVGIPLIVLIFYKNQSRKYLNKGNGNWEESKALLFREELDYLDSIFNDFVTVNLSRRSDYYRNGTGTSEIEQTLDMNVYVEPDTPCAGWTTYIHKLEEGGEGGIEKPFQIRQLWFSKQKFDIFPMGKVSIVNVYGKNDEPLSYAPSIFSVIREDGIQIFYVRAYSQYLLDSSVNPQNLPQKLNTL

SEQ ID NO: 46 - protein, 579 aa, Theileria parva
MSHLMNLPILVLKEGTDTSQGQAQIISNINACQAIVDCVKTTLGPRGMDKLIHTERDVTITNDGATVLKLLDITHPAASVLVDIAKSQDDEVGDGTTSVTVLAGELLNEAKAFILDGISPQVIIKYYREACQVALNLIDKVAIHLSNKSSTDKKELLIKCAETTFNSKLLSGYKTFFAKMVVEAVATLDEDLDEDMIGVKKVTGGSCEDSLLVKGVAFKKTFSYAGAEQQPKKFVNPKILLLNLELELKSEKENAEIVINNPQEYQKIIDAEYRIIFEKLENAVKLGANVVLSKLPIGDLATQYFADKNVFCAGRVDENDLIRTSKATGASIQTTLNNLSVDVLGTCGVFEEVQIGSERYNMFTDCKSAKTCTIVLRGGGQQFIDESERSLHDAIMIVRRATKCNTILPGAGAIEMLLSTYLLHYSLNTINPTDSVNHVNCVNSVNHVNGVTGVNKSLVGKRHIIMNGFAKALECIPRNLATNSGYNSNDLLSILRNKYNQLEIVNGEIKVNNEESWYGIDCYKGSVCNAYKACIWEPSLVKKNSIYSATEAACLVLSVDETVKNQSRQQLQSALPQPK

SEQ ID NO: 47 - protein, 155 aa, Theileria parva
MPKNKGKGGKNRRRGKNDNEGEKRELVFKMEDQEYAQVLRMLGNGRLEAYCFDGTKRLCHIRGKMRKRVWVNAGDIILVSLRDFQDSKADVIAKYTAEEARTLKAYGELPEATKINETDVYDDEADNCIDFQDVSSESEPEDESQEESDFDIDDL

SEQ ID NO: 48 - protein, 721 aa, Theileria parva
MTSKDETPDQEVYAFNADISQLLSLIINAFYSNKEIFLRELISNASDALEKIRYEAIKDPKQIEDQPDYYIRLYADKNNNTLTIEDSGIGMTKADLVNNLGTIAKSGTRAFMEALQAGSDMSMIGQFGVGFYSAYLVADKVTVVSKNNADDQYVWESTASGHFTVKKDDSHEPLKRGTRLILHLKEDQTEYLEERRLKELVKKHSEFISFPISLSVEKTQETEVTDDEAELDEDKKPEEEKPKDDKVEDVTDEKVTDVTDEEEKKEEKKKKKRKVTNVTREWEMLNKQKPIWMRLPSEVTNEEYAAFYKNLTNDWEDHLAVKHFSVEGQLEFKALLFVPRRAPFDMFESRKKKNNIKLYVRRVFIMDDCEELIPEWLSFVKGVVDSEDLPLNISRETLQQNKILKVIRKNLVKKCLELFNELTEKKEDFKKFYEQFSKNLKLGIHEDNANRSKIAELLRFETTKSGDELVSLKEYVDRMKSDQKYVYYITGESKQSVASSPFLETLRARDYEVLYMTDPIDEYAVQQIKEFEGKKLKCCTKEGLDLDEGEDEKKSFEALKEEMEPLCKHIKEVLHDKVEKVVCGTRFTDSPCALVTSEFGWSANMERIMKAQALRDSSITSYMLSKKIMEINPRHSIMKELKTRAANDKTDKTVKDLVWLLYDTALLTSGFNLDEPTQFGNRIYRMIKLGLSLDDEEHVEEDSSMPPLDEPVVDSKMEEVD

SEQ ID NO: 49 - protein, 440 aa, Theileria parva
MLGNHVMGSNSPHIKILSSVTFLHIAKMEEVENVKVDALERVDTESVLNYDTVLEKKPLRSSVASFFKRYSAVLVILTAVLLFTFTFAAIALSSGRSAIRKNRELLSVEFEKLQFDNFVTIKGEREEDFPKMVAEVLYKVAVEFDPKEEALIYVQFNDFNKQHDKKHNNYRHKKTSYTNFRNNLNDINEHNAKPNLSYTKNMNHFGDISSKDFMKRYTKKVLLNLPKDHVSTYNNNRPMSVDLRSHGVLTPVKCQEENELSWPYSVVAVAESFVKKTSQKTVSLSEKQLVDCVTDKKSANNPFLGYKYLKDLGLFESELVDKSTTKCPALEGERFKVPSYSYSYEPDLVALLLNAGPLTVPVAVSEDWQFYADGTLDVCGAELNHFLTLVGVSFDEKGNHWILKNSFGEGWGNKGYLLLTRNSKEYKDDCGLTSFAVYAV

SEQ ID NO: 50 - DNA, 1807 bp, Theileria parva
aaggttaagtatagattttttgtgacttttatttacttacctgtttgtataaaattataaggttataaaatttaaccaaataaccgatttaattgtaatatttaaagttttgtacagtatatgagggtcaaaaaagttttattatatacacttccggttgtcggtattttactggctggatctttgattatatttaatttcgttaggaaaagaccggaaaaagaagaggaactcaaacctccttctgcattagaagatgaacttaaaaaacgtgaagaagaaagccgaaaacgcatggaagaaatgcaaaaggaaattctcgaaaaaaagttaagagaaggtaaaaaagccttggaagaacttgaaaaacgtgaaaaagaagtggtagatgagtttgcaaaacacctcaaaaaacctgaagaaagacttcctaaaattattcttacattggattccggttttccaacagttgatcctattacatatacttcaggagtttatatggtagcagttagtaaaacaacttttacctcagattcagatcttgttgattttactcacacactgctgggcataaagtttctagttactggtgtacaatttggtgggaaaacatacacaattaaaccgattgaagctactatggccacttcaattgcatttgccgctgatcctggattctgttattttctattaataccaggccctgactcgaaaccaatattcttcaaaaacgacggagataaatttttacgttgcgtagggtatccaaaggttaaagaagaaatgctagaaatggctacaaaattcaatagactaccaaagggcgtggaaatacctgcacctccaggagtaaaaccagaggctcccacacctacaccaacgacaataactccttctgtacctcctactataccaacgccaataactccttcggcacctcctactacaccacctacgggactaaattttaacttgacagttcagaacaaattcatgataggttcgcaagaagttaagttaaatataactcacgaatacgagggtgtatacgaagctcataaatatttcattgaaaggggcagctttacccctacctcattctcaatcggtgatcttccacaaacaggtcttccagtaaatcaaacagtggatacaattgtggtatatttccatcgagtaacgatgggtgaacccgttggtatacctctaattgtgttaatcttttataaaaaccaatctagaaaatatttaaataagggaaatggaaactgggaagaatctaaagctctattatttcgtgaggaacttgattacttagattccatttttaatgattttgtgacagtaaacctttctagacgttctgattattatcgtaatggaactggcacatcagaaattgagcaaacgttagatatgaatgtttacgttgaacctgatacaccctgtgctggatggacaacgtatatacataaattagaagaaggaggtgaaggaggaattgaaaaaccttttcaaattagacaattatggtttagtaaacagaaatttgatatattcccaatgggaaaagtttcaatcgttaatgtttatgggaaaaacgatgaaccgctatcttacgctccctcaattttcagtgtaatacgcgaagatggaattcaaatattttatgttcgtgcttactcacagtacttgcttgattcaagtgttaatccccaaaatttacctcaaaaattaaacaccctttagattttttttaaaaaaatcatgtaatataattgtttttgaaaaaaaaaaaaaaaaa

SEQ ID NO: 51 - DNA, 1740 bp, Theileria parva
atgagtcatttaatgaacctaccaatccttgtattgaaggaaggcactgatacatcccaaggccaagctcaaatcattagtaatatcaacgcctgtcaagctattgtcgattgtgttaaaactactctaggtcctagaggaatggacaagttgatacatacggagagagatgtgacgataaccaatgacggtgctactgttttgaaattacttgatattactcatcctgccgcttctgttcttgttgatatcgctaaatcacaagatgatgaagtcggtgatgggactacttccgttactgttctagcaggtgagttattgaatgaagctaaggcgtttatattggatgggataagtcctcaggttatcataaaatactatcgtgaagcctgtcaagttgctttaaatctcattgataaagttgccattcatctctccaacaaatcctcaactgataagaaagaactactgataaaatgtgctgaaactacttttaattcaaagttattgtctggttataaaaccttttttgccaagatggttgtggaggcagtggctactttggatgaggacttggatgaggatatgattggtgttaaaaaagtcactggtggttcctgtgaggactcactcctagtcaagggtgtagcattcaagaaaactttcagctacgctggggctgaacaacagccaaagaaattcgtcaatccaaagattttattacttaatttggaattggaactcaaatccgaaaaagaaaacgcagaaattgttatcaataatccacaagaatatcagaagataatagatgccgagtataggataatatttgagaagcttgagaatgcagtgaaactcggtgctaatgtagttttatctaaattgccaattggtgatttagcaacacaatactttgcagataaaaatgtattttgtgccggccgggttgatgaaaatgatcttataagaacgagtaaagctactggtgcttctattcaaaccactctcaataacctttcagttgacgtcttaggaacttgtggtgtgtttgaggaagtgcaaattgggtctgaacgttacaatatgttcacagattgcaagagtgcaaaaacctgtacaattgtgttgagaggtggaggtcagcagttcattgatgaatctgaacgttcactccatgacgcgattatgattgtcagaagagcaactaaatgtaatactatccttcccggagctggtgccattgagatgttgctctcaacttatctcctccactattctctcaacactattaatcccacagactctgtcaaccatgttaactgcgttaactccgtaaatcatgttaatggagttactggggtgaataagagtctggtgggtaagaggcacataataatgaacgggtttgcaaaggcattggagtgtattccaaggaatttagccactaattctggctacaattcaaatgatttattatcgatactaagaaataaatacaatcaattggaaatagtcaatggagagataaaggtgaataatgaggagagttggtatggaatagattgttacaagggaagtgtatgtaacgcatacaaggcttgtatttgggagccgagtttggtgaaaaaaaactcaatttactcagctactgaagcagcttgccttgttctctcagttgatgaaactgtcaaaaaccaatccagacaacagttacaaagcgcactaccacaacccaaataa

SEQ ID NO: 52 - DNA, 468 bp, Theileria parva
atgccgaaaaataaaggcaaaggaggaaagaaccggagacgcggtaaaaatgacaatgaaggcgaaaaaagagaattagtcttcaaaatggaagatcaagaatatgctcaagttttacgtatgctcggtaatggcagacttgaagcctactgttttgacggcactaaacgtctttgccatattagaggaaagatgaggaagcgagtttgggtaaatgccggcgatattattttggtatcgcttagagatttccaggacagcaaggctgacgtgatcgcaaagtacactgctgaggaggctcgtactctgaaggcttacggcgagttgcctgaagcgaccaaaatcaacgaaactgacgtgtacgacgacgaggccgacaactgcattgacttccaggacgtatcgtctgaatcagaacctgaggatgagtcacaagaggagtcggatttcgatatcgatgatttataa

SEQ ID NO: 53 - DNA, 2166 bp, Theileria parva
atgacatcaaaggacgagacacctgatcaggaggtctacgcttttaatgctgatatctcccagcttttaagcttgatcatcaacgcattttatagtaacaaggagattttccttcgtgaactcattagcaacgctagcgacgcactggaaaaaattaggtatgaggcaatcaaggatccaaagcaaatcgaggatcaacccgattactatatcaggctgtatgccgacaagaacaacaacaccctcacaatcgaagattccggtattggcatgaccaaagccgacctcgtgaacaacctcggtacaattgccaaatccggcacaagagcattcatggaggcactgcaagcaggctcggacatgtcaatgatcggacagtttggtgtcggtttctactcagcatacctggtcgcagataaggtgacagtagtgtccaagaacaacgcagacgaccagtacgtctgggagtcaacagcctcaggccactttacagtgaagaaggacgactcgcacgagccgctcaaaagaggaactagactaatactgcacttgaaggaggaccaaactgagtaccttgaggagagaaggctgaaagagcttgttaagaagcacagcgagttcatttcattcccaatctcgctctcagtagagaagacccaggagaccgaggtcactgacgacgaggcagagctagacgaggacaagaagcccgaggaggagaagcccaaggacgataaggtggaggacgttactgacgagaaagtgaccgacgtcactgacgaggaggagaaaaaggaggaaaagaaaaagaagaagaggaaggtcaccaacgtaacgcgtgagtgggaaatgcttaacaagcagaagccaatttggatgagactcccgtctgaagtcaccaacgaagaatatgcagcgttctacaagaacttaaccaacgattgggaagaccacttggccgtgaaacacttcagcgttgagggtcagcttgagttcaaagctctactgttcgtcccaagaagagcgccgtttgacatgttcgagtcccgcaaaaagaaaaacaacatcaagttgtacgtcagacgcgtatttatcatggacgactgtgaggagctcatcccggagtggctttcctttgtgaagggtgtggtagactcagaggacctgcccttgaatatttctagggaaactctccagcagaacaagatcctcaaggtcatcaggaagaacttggtgaaaaagtgcctcgagctcttcaatgaactcactgagaagaaggaggacttcaagaagttctacgagcagttcagcaagaacctgaagctgggaatccacgaggacaacgctaatcgctcaaagatcgccgaactgttgaggttcgagacaaccaagagcggagacgaactcgtgtcactcaaggagtacgttgacaggatgaagagtgaccagaagtatgtgtactacatcacgggagagtcgaagcagagcgtagcctcaagtcctttccttgagaccctgagggctcgcgactacgaagtcctgtacatgactgacccaattgatgagtacgcagttcagcagatcaaggagtttgaaggcaagaaactcaagtgctgtaccaaggagggcctggaccttgatgagggcgaggatgaaaagaagtcctttgaagcgctcaaggaagaaatggaacctctttgcaagcacatcaaggaagtgctccacgacaaggtggaaaaggtcgtgtgtggaacaaggtttaccgactctccatgcgcacttgtcaccagcgagttcggctggagcgcgaacatggagcgtatcatgaaagcacaagctctcagagactcgtccataacaagctacatgctgagcaagaagatcatggagattaacccgagacatagcatcatgaaggagctcaaaactagagctgcaaacgacaaaacagataaaaccgtcaaggacctagtctggcttctctacgacacagcgctcttaacctcagggtttaacctcgatgagcccacccagtttggaaacaggatctacaggatgatcaagctcggactctcattggacgacgaggaacacgtagaagaggactcatcaatgccgccgctggatgagcccgttgtcgactccaaaatggaggaagttgactaa

SEQ ID NO: 54 - DNA, 1323 bp, Theileria parva
atgcttggaaatcatgtcatgggatctaattccccccacattaaaattttatcatctgttacattcttacatattgctaaaatggaagaagtagaaaacgtaaaagtcgacgccttggagcgtgttgacactgagtctgtccttaattatgacactgtgttagaaaagaaaccattgcgcagcagtgttgcctctttcttcaaaagatacagtgctgttctcgtaatattaactgccgtgctattattcacattcacttttgcagcaatagcattgtcatcaggcagaagcgcaatcagaaagaacagagaactcctgtcagtcgaatttgaaaagcttcagttcgataatttcgtgacaattaagggagaaagggaagaggacttccccaagatggtagctgaagttctttacaaggttgcagtcgagtttgacccaaaagaagaggccttgatctacgtccagttcaatgacttcaacaagcaacacgacaagaagcacaacaattacaggcacaagaagacctcgtacaccaacttcagaaacaaccttaatgatataaacgagcacaacgcaaaaccaaacctgtcgtacaccaagaacatgaaccacttcggtgacatatcatccaaggatttcatgaagagatacaccaagaaagtactcttgaacttgccaaaagaccacgtgtccacctataacaacaacagaccaatgtcagttgatctcagaagccatggtgtattgactccagtcaagtgccaagaagaaaatgaactctcatggccatactccgtagtagcagtcgccgagtcattcgttaagaagacatcacaaaagaccgtatccctcagcgaaaaacaattagtagattgcgttacagataagaaatctgcaaacaacccattcttgggttacaaataccttaaggacttgggtctgttcgaatcagaactcgtagacaaatccacaaccaagtgcccagcattggaaggtgaaagattcaaagtcccatcatactcatactcatatgagccagatttggtggcactcttgttgaatgcaggaccactcactgtaccagttgcagtgagcgaggattggcaattctacgctgatggaaccttggatgtatgcggtgctgaattgaaccacttcttgaccctagtaggtgtcagctttgacgaaaaaggcaatcactggatactcaaaaactcattcggtgaaggctggggaaacaagggatacctactgttgactcgcaatagcaaggaatacaaagatgattgtggattgacctccttcgcagtgtacgcagtttaa

SEQ ID NO: 55 - DNA, 33 bp, Theileria parva
gtagggtatccaaaggttaaagaagaaatgcta

SEQ ID NO: 56 - DNA, 27 bp, Theileria parva
actggtgcttctattcaaaccactctc

SEQ ID NO: 57 - DNA, 27 bp, Theileria parva
agcaaggctgacgtgatcgcaaagtac

SEQ ID NO: 58 - DNA, 27 bp, Theileria parva
gagttcatttcattcccaatctcgctc

SEQ ID NO: 59 - DNA, 27 bp, Theileria parva
tgcggtgctgaattgaaccacttcttg

SEQ ID NO: 60 - protein, 11 aa, Theileria parva
VGYPKVKEEML

SEQ ID NO: 61 - protein, 9 aa, Theileria parva
TGASIQTTL

SEQ ID NO: 62 - protein, 9 aa, Theileria parva
SKADVIAKY

SEQ ID NO: 63 - protein, 9 aa, Theileria parva
EFISFPISL

SEQ ID NO: 64 - protein, 9 aa, Theileria parva
CGAELNHFL

SEQ ID NO: 65 - DNA, 5399 bp, Theileria parva; identical to SEQ ID NO: 15

SEQ ID NO: 66 - DNA, 21 bp, Artificial Sequence
  Description of Artificial Sequence: Synthetic primer
gagcggataacatcacacagg

SEQ ID NO: 67 - DNA, 30 bp, Artificial Sequence
  Description of Artificial Sequence: Synthetic primer
ctcgagtcctacataccatctgccgaaaag

SEQ ID NO: 68 - DNA, 22 bp, Artificial Sequence
  Description of Artificial Sequence: Synthetic primer
tcagtctagtcctagcaaaggg

SEQ ID NO: 69 - DNA, 2540030 bp, Theileria parva
ccctaaaccctaaaccctaaaaccctaaaccctaaaaccctaaaaccctaaaccctaaaaccctaaaaccctaaaaccctaaaccctaaaccctaaaccctaaaaccctaaaaccctaaaccctaaaacccctaaaacccctaaaaccctaaaccctaaaccctaaaaccctaaaccctaaaacctaaaaccctaaaccctaaaccctaaaaccctaaaccctaaaaccctaaaccctaaaacctaaaccctaaaccctaaccctaaaacctaaaacctaaaccctaaaaccctaaaaccctaaaccctaaaaccctaaaccctaaaaccctaaaaccctaaaccctaaaacttaatgtcctaaagaatctaaaatacttgtggggctaataccaaacccttaacttgagggtcaaaaagactaatctaatgtggggtcaaaactctaaaataataccaatttgaaaaccccgaagttaggggtctaaaacaggttaaaacaactaaacacacttgaaacactctaacaaaaactgaaaacactctaatctactctaatttaacacttgaaaacaacttaatctaaaatactcaactctagagtctaaatgtaactctataacactataaggactccaatcttcttgaaaaatactaaataaggatctaacagtaagttttaaaacactcaaacatagtaaaacaatactttgaaaactagtctactctaaaacactcaactatagagtctaaaacaactaaaaactactgaaatcactgaaacagtagtaaaataacacttaaatataactgaatagcactccaactcaagtaaaacaatactttaaaaacactcaaacataatctgaaacactcaaaaaggactactaaaaacaactgaaaacatctaaaactctaatctaaaacactttaaaaatactcaaaactaacatctaaatcagttaatctaaaaactacttaaatctaactgtaaaaccctcaactctagggtctaaaacaactgaaaacactctaatctaggctcaaaatgaaacttataacatataagattcaactatagtaaaacaatactgtaaaacaacttaatctaacacataaaactactaaaatctacttataaaactcgaacattgtaaaacaataatctaaaactctaatctaactataaatactaaataattatctaatactaacttttataacactcaactctggtgttaattctaaaaacatggggaaatttaatgtcttagtatgaaacagtaaagtaaagactaataactaactgttaataaactcataataatgtttaacttactaaattattacactaataacaatatctagttaaaatacttacctatgaaactttatctaaatgactaatctaaaaacttactttgatactgtctaaacactcaaatctaaaacactatcttgaaacagttaactcaagataatggataagaatgataaaataatgacagtgagaattatgaggtagtaaagtagagtactggaatgaaattaatcagaaaccctgaatctgagggtcaaaggattaggtattaggacattaggacagttaggtgattaggtcattaggaccattaggattaggtcagttaggacagttagatggttaggacatccttagttaggtgtttaggacagttaggattctgtcagttattacgtcttttaactacttactggaacctctgaatcaacaactgacttatgaatggaactaaaaataccaaattgaagagagttattcctcaaacaattatttattaataccaatacctggatgaagtaaatggtggacagacaaatgacattagttaacatcagtacatgacctaagtagtatcctgataacatgttgattgagttttatatgattttggaatgtttcgatgttttattcatgtgtgtgacgatttcagttagtgaaattgaagaataatagtattaaatttaagtaaaaacattattatatagtttaaagttaataaataaacatattataaatgtgtgtgaaagaaattaaatgatgtgtgtaactaagttttcaaatggggaatggaatccaaattaacgttaatgtgtctaaaattgaccaaaaatccatatacccaaatggccagtcgaggctcaaaagttggtaggacccggtcgacacagtccctgaaactgatatcccaagtccaagtaactaaatagtgctaaggtctcagatgtatatacaaatccttaaatcggcaatatgcactgaaatgttattatcactggctatgctatacataccggctataatatacagagtgtatatactaggtagtatacatggtatagtagtattgataactaatccactaaaaataaaactcagatctaaagtgaataactgacgaataacaggttgtaataatgtttaaagagtttagaaagtgtaaatgagtggttaaataatattgtttagttgatgaagtgaaagtggagtgagtgaacaagatgactaaaaataaacagggttcagaaatcttgaataaagaaagaataatacatataaagattgaagaagaaattaaaaattaaagtgaatttgtgtgtgtaatgtgtatactacatttaaaatggttgtgattgtagtttattgaaaaatattttacagttagtaattatcaatatcaaaagagttgtagtcttaggattaagttggatgacttaattccgctgtttagatcctgataaacattaacagcgataaaaagaatatataatctatgcctggaatagcatataatccagattgagtagtaatttcctaatactgaacggattgtactggtatggattgtgtcaagatttgaaattcaggaagaaatattgtaaaggttgaggtccaaaaactgatgtaaagttggttgaataggaataacttggggtacatatagatatttctgatgatcgttaggttgttgtggaccatacgaaacagatttgggatgttattgaggagcctcatgctgactttcggaataaggtggtggtggataactaggtggttcaggagtatcatgttgactttcggaataaggtggtggtggataactaggtgtttcaggagtatcatgttgactttcggaataaggtggtggtggataactaggtgtttcaggagtatcatactgaatttcagaataagctggtggccgtacaggttgacgaacagataattgaggccctggatgaataggctgcggttgtactggtaattgatgacttggataaggtggtcgagctggtattggaggccttggatacgtaggggtaggtcgagattgaggtggagcttgttgatattgttgttctggtatgggaataagccgtggagttgatggcttaaagtcaagtttcttaagttggccagaatcattcttcactctaaacttatttgcaacaagatcaatcaacaatgacttaatatatccaaagtcagtgtcatcactattggtccaaacatcttcattgccgtatttcaccttctgacacttgactccagcattgaactcaagactgtatgagtaactaacaaggtttactgagtaatcggtagattttagttccatatcattctcagcaaagaacttaagcttagaaaggttaactctggtataggtgatgtcgatccagggtttatttctatcaggtggctgatggaataatagaaacttatcattgtcgaggagcaaaaaaaggtatttgacaacatctacatatgtgactctgataccaaaaacatcagtttttgattcccaaatcactgtggtacaatgagtaaccttgatgataaaacagttagacctgggagtgaaggtacgtataacaccactctttaaggaatactcaaagcaggtaaactgagtcttactgatatcaagggtgactttggtggcggatgcatattggtatttaggagtagatggagtgcttgcagatgcagtacgaggagtaacagatgaaatgatcggtccttcataatttacctttctagatttccttttgtcatcgaatacaaagaattcgtttttaacgagatcaagatcaaaattagttatgtactcaaacttgtcatccgtatgggtccaaataacaacatctccgtaattgatcctcttacagttgactccggctttaaatgtaaatctgtatgagaactcatatatggtaacttcataatcactcgatgtgagttccttgtctatgtcgaaaaatttcagattggtgggatcatgtctcttactggtgatgttagtccatggcttattcctaccagtcttgtatagaattacaaagttactactcttaagaagaatgagaaggtgctttttattattgccagaacccattagtaccacctttacagcctgatcattatttttacattcccagatataaagttttttcttaactaccttattaaaagacttaccaggtttggcggtgaaagttctatacttaccattcttggagtaatcggaatcattggtactggtagtcttatttatatcaagagtgatctgcttagcactagtgctagaaatggaataggttactactgaattcatttgacagagtagtgtaatatatagtaataaatttatgaatagccaatgtccaatcatgttacaaaaatacaaaaacaaaaattaaaaattaaagtgattaaatgagcgattggttataagtgcgattgacagtttaaaaaatttcaacagtagaatatacgaacaaaatggaaatactttgatatcaatagcttcgtccaaatacctcaaaagagttataaattttgttaattttaaagaccaattttaagactattaaacataaactgatctatatccaagattatacgcagtacgcttacaacttttggttaattgtttatcagataattcagttgaaagtgtaagttcagattacggtggtgaaccaggttaaagttcgtatggcaactaaattaatgtgcgtaatgtattcaaaaagtaaatgccaattgaaatactagatagttgaataaattaggtatagattttggaacggattaattaactgattcaggttttattcagactcatttacagttacatatgcgggagtagcatttgttgattcagtgggaggggttgttctagtttgagaagttgtttctgtttttttagtagtagaaggtgcttcagtaggagaagtatcagcagggttagtagtgttggtggtagtagtataagtggtactagtagaatcagtggtatatttttggttctggtattattggttttggtatttgtttgagactttgggtcgacttggactgttcggtagaaaccaccaccgagatcaatagttacatacttaatagattcatcaacaaatattacagacttagcagacacattgtcgggagcctcccagacggtgttggacccacgggtgattttgctgaaggagtggttagacttagcagtgtaaacatgaacattatcagtcttggaataatcaaaatctctggtagaatttctggtattcaggtcgagagtagaggggttataagaggaagtggattcagcaaatgtggcagttgtttcagtttgatcaggaattacggtagttgattcaggggctaaagtagttaattcaggacttacagtagttgattcaggagttggtagtagtagacagttggtggtgacggtagttactttaagagagccagtggtatattcaatactcttcacatccccattgtggttcttgaggaagaatttatttgatatgagatccaggtgaaatgagacaatttgaccaaactcactgtcgtgtttccaaagaacatcatcaccgaacttgattttcttacacttggcaccattcttaaactcaaaactatagtatcggtcagctatagtaggttcgtaactagatgcgtcgataactgcatcactgtctccgaggaatttaagtttagtcacatcatacctctgatgggttatgttcatatttgtatcagatctctctatgacatcatatgcagctctgtaaatcagtacgaacttaccactctggaggagcacggctaggtatttaggactgttgtgatgatccatatatatggccttgaggccataatcatcattcttggaatcccacataacagcattacccttagtaactttagtgattacattaccttgcttaactgtgtatgtatgatacttattatctttattttccttggagtactcatagtcgttggtactaccagtcttatctacatcaagggtaacctgtttggtagaatttgatgctggagttgatacacgagtaacattaatttctggaaaagtagtttgaccgtttggggtagagtattggcctcgtgaagtttgaaaaccgttagtgggtgacctagtaccagaagtaggatgggctactaccgaattcaattgacagagtaatctaatatacagcaataaatttatgaccaaccattttgcagtcatgttacaaatgcgttaacaatctaattaattgttcagatatttgctgaatggggaaacatgcattttgaaatatcaatatgaatactgttaataccaataataccacagaatctacacaattaaaattaacaagaatactaatatcaacccagttgtaatgctaaaacatgtgacaatctgctaataatactatttatagtactatttatattaattatatttgtaacacgcagctcaaggttaataatattagccttttaatataaatatttaaaaagaataaatgagtaaattaaaacattaaagggagtatgatcaaaactgaatgattgtacgtgcaattagtctgatagtttttcacagtttattaaagttttattagtatcttacaattgtgttaattattactgaaactctttctaaaattcgagcttcatgaatatattcaactataaattcagaccctggtctatgattttgatgttaatatcaaatatttgacaagatatagacaatatatgttacagattgatcagtttatatgttcaggagttgttatagtatcagtgtcacaatttaaactcagcataacactgaagtagaacagattggtattataagattaggtagtagtatcagaaagtgtaattgttcggaaggaaccattggtaagttcaatagtcacataattattagcttcatcaaatattacatcctttgcaaataaattttcagaagcctcccagataaccttttcaccacggacaactttggagaattcacaaccagatttaggggtgaatatgtgatcatcaccattattctcatagtcatatcgatcggttgaccctttcttatcaatgtcaagttctgaggaagtgttcctgttaacatcggttacaatgggaagagtaccaggcctatattcaatcatcttcaattgatcagactggttctttacgaaaaacttatttgaaacaagacctaggtgaaatgaaacaattgttccaaatttagtgtgatcagaatgtctccaaagaacatcgtcagaatacttaactgtttgacacctgacaccatccttaaattcatatcggtaggagttgttaacaatagtgatttttaagtcagaagatgtgagttcagagtcacgagtgtcaaggaacttaaggttacttacgtcatgtctcatagaggtaatgtccctaaaggtacctgaggactcttggaataggaaaaacttattattatccatgagtatggctaggagtttagcagagtccatatatactaccttgagagagcaatcggtagtggactcccagatatcattggaaccacggacaattttgttaaaagcgtacccaaacaaaggaacgtatgtatgaaaatcgtcatcagtcttaaggtactgatactcaaaagtagtctcacaaacattgaggtcaatagtgataagagtatcaggtctctgtacaagttcaacattagcatcaccaaacctattatttaccgagaactggttggtacgaagatttatattgaaggactttataggagtcttgagaatatcatagttataaacaatcatatcaccaagatttattttacgacataggataccctcattaaactcgaaactgaatacgaaatcactgatggaaaacttatagtcagatggagtaagttgacgatcagattcaggaacagtaagggaagaactggagtcggagacttcttggataccatagaatttgagtttggaaacatcacgtctatcacgagatatttcaacccacctgttatagaagtgagtgaacattttatacatattattgttaagtagaaggagaagatacttcacatcatcagaaacaactactttagtgccaaaaacatcatcttgatttggagaattccagacagttggatgataataagaagttgtatcatcattgaaaaggatcatactgcacttcacattaggtttgaaatggtattcaaatgatttaccaacctttacaatatcgtactgggactgtgttagacccaagttcagtttataaagtcctggaacagcatcgacactgagggtgccgccagatgatgaggtaatgatctttgatttaacaggtttatattcaaattccttcacttgatcagactcattcttcacactgaacttatttgctacaagatctagatgaagtgactttatgaacccaaagccagtgtcgtcactagcactcttggaggaagtagtgtcatcaatagtcttagttgtatcatcagtatcagtagttgtcttagagccgtcaggaacgggccagacacgtacacccttgtgagtaatcttactacacttgacaccatcgttaaactggagattgtatgaaagatcagataggacaatcttatactgggatgaagttagaacagtgtcgtcactgaagaaactcagttcatccaaatcacatctatcacaggtaacatcggtccacttattatcagagttctggaatattaggaattttttgttatcaaggagtatggctatgaattcatctttcttagtagtcaccatggcgccggaaacattaccactagattcccatacagaagtctggccatgagtgaccttagtgaacacattgccagacttagcaacgtatgatattacgccattcttctccttacattcgaactgttgggtactattagtggtattgatatcaagagtgactgaggtgacagtggttccagttggagttggagtgacagattgcgtagtggttgatacattgggctgggtggtagtagtagactcagggctggatttagtagggaatccagtgacagattcaggagtagtttgagtagtaggatcagtaacactagtagcagtggcagacttagtagcggattcagtagaagtggcaagacttagttctagttccttcacagcagtgtcagactttaaggagaacttgttactggcgatatcgagtgacagtgactttatcttaggaaactttggatcgtcatcaggtttccatatattttcattttcaagcataatttttgtgcacttggtattgaactcatataccaaaatcagaccagacatcgaaactgagtaatcaggcgacttgagaacagagccaccctgaccaaggaatttgagattggaaatgttgtgcctctgactggtgatgtctttccatgttccatcagaggacttttgaaacagtttgaactgattgttactcagaagtattgctaagaactcagctttgacactcaccaagatagcacaaacgttaccaccagactcccaaacgacagtggttttatgagtgattttggtgaaaacaatgtcagacttagcagtatatgaagtgacaccattcttctccttacattcgaactcactggtagactgtttcttatcaacatctagggtaatgtatttagtaacaggagcggtggattcagtttcagtagtatcactagtgagttttagatcctttacagtcccagactcattagtaacgctgagctgatttgataaaagacagagtgacagtgacttaactgatttgaacttttggtcatcatcagatttccacagatctatacccctgtgagtgatcttgtgacactcgacaccagggttgaactcaagaatatatgagtgacaagaaatggtaactttgtagtcactggtacctatctcagaatcatcggtgagaaatttaaggccactaatgtcaattctagatttggttatatcctcccactcactggatttaaggaatagtttaaacaaattgttgttcaggaggattgcgaggaactcaccagtggtagtaaccaaagttccacccacagtatcattagattcccagacaactttggcgccctcagttaccttggtgaacagataacaggatttaacagtgtatttatgaaattcatattccttcaaatattcaaactcacttgttgactgggtcttactgatatcaagtattactggaatgacaacaggtttaatatcaccagactcatttttaaggctgaatttattatcgatgagatccagagacagtgactttatagtagaaaattttgggtcgccatcaggtttccatatatcttcatttccaagcttaaccccaagacaattgaatccacgattgaactcgcataaaaaggtgtgaccagacatagaaactgagtaatcagtcgatttgagaggagagtcatcctgaccaaggaacttaagtttcttaacatcatgcctctgattagttatgtccttaaaggcaccatcagaagatttaaggaacagtttgaacatgttgttactgagaaagatggataggaaaaccttattgtcggaggtcttagtattaacaatggtagcacaaacattaccatctgattcccaaatggcagtattggaatgggttaccttagtgaacacatgaccggacttgggactgaacgtggaaacgccatttttctcagtgtggtcaaactcattggtagactgagacttgtcaatatctagagaaactgacttgacctctaccgtgctgaacttgtttaaaacaagatcaagtgacagtgacttaatggctccaaaaccgcctttgtgttcataaacacattcattgccaagggtgatcctaaggcacttgactctatcatggaactcataactaaattcaaaatcagcaagagaaaccttgaagtctgagggattgatctcaccaccctcaccaaggaacttgagtttagtaacgtcacgtttctctgcggttatgtccttaaagacagtaccatcagaaaactggaacagtttgaaagtactgttatcaagtagtataactaggaacatattattactttcagacttgatcctaactaagttaccgaaaatgttactatctgactcccaaacgatattggcgccatgagttaccttgccaaacacaaagcctggattagcagtataagttacatagccatccttatcagtgcgggagaacttattgttagtagcagttgtaaggtctaaagtgattggtcttacatctacagcctcaatgacgtcagtggtggattgacctctagtaagtaatagacgttgagtggtatcaatagatttggtgtcaagaggaggttcatatggtagttccctcatagaacaagactggttcttgatgaaaaaacggtttttaacaagatccactgaaaatgactttatggatccgaagctcctctggaaaggatggtcagtgtgtctatagacctgcacattaccatactttacagtcttacattctgctccctcattgaattgaaattcatatatgtagttagtgactgtaaccttgtagtcaaatgaagtgaatggagtattattactctgaattggcttagattcagtccacttagtacctgacagttgaaaatccttgaacataccgttaatgaattgggcagatacgtaattacaactatccatatacgtgactatggtaccaaacaaaatacgcgttgactgaaagacaacactgttgcccttggtaaccttggtgaaaccatagccaggcctagcaacgaacttagtgaagccaccgctattggaatattggaactgatctgttgacttcttgatatcgatgtcaagaacagtcttggtggtagtagtggttccggtagtagcggtttcggtagtagcggtttgggctgaagatgatgaagtagtcactggtgatgaggtttgagactcagtccacttactatctgactgctggaactccttggtagtgccgttactgagattgatggatagagagtttttattaccatccttgatcacctttgttgcaaataggttttcttctgactcccaaacaacagttgatccctgcatgattttactgaacacatggcaatccttcccagtataagtgacaactccattctgatccttgtattctaactgatcagtagactgagttttctcaatatcaagagtcaccttggtgggttcagcgggcttgacagtgccagactcattcttgataaagaaaccgtttaaaacaaggcctagtgagaatgacttaattgttccaaactgggtgtcgtcagtatggctccagagagtcacattgtcaagggtgatttttttacattttacaccagttttgaactcaaaattataggataaaccagacatggatactatgtaatcagacagtttaatctcaacattattatcaccataaaacttaagtgatgcaacattgtgcctatcggaagtgatatcagtccattgtttttcagactcttggaacaacttgaacgtgttgttgtcaaataaaattgaaaggaatttactggaaatagtgacaatggtagcacaaacattatctttggactcccaaataagagttggtcccctcacaaccttgttgaacacacggttttctttgggtatatatatgtgatcgctaccctcgatataactaatgtcgaactctggagtggatttagtggtttctagatcaagtattactggttttgtgacggatttaagatcaccagactcattcttaacgaagaaaccgtttgaaacaagatcaaggtcaagtgacccaattgacccaaaatcggtgtcgtcttgataattataaataatatcattgccaagagtgatcttcctacagatagtaccctggctaaactgaattctataggataattcaacaattgtaacagtgtattcagtgggcttaatctgagcattactgtcattaaagaacttcagtttggtaaggttgtgcctcttatcggttatatcaatccagttaccttcagactgttcgaacagtttgaattcattgttattgaagagtatgactaataatttgctacagatcctaaccatggttccagatacatcatctgacttccaaagaacaatgggcccctcggtaaccttactgaacacatggttttctttgggagtataagttactacaccaccctcatctttgtaatcatactcggaagcggattgagtattatcaatatcaagagtaactggtgtgccagaaacggccaccttgggtggagtaacttcagttccacttagtgtagctgcaggaggagatgtaactttagctggtgaaggtgttgcagttgatggagtaacggcaggtccacttacttgaggtgcagttgtagttgtagatttagcttctggatctttagctggtgccggaccttgagtctgaggtgttgtagccggagtagttgttacagtagctgacttgggttgactaacaggtgatgtcacaggggatgaggatgcagatccagaaataagtttactttgatcatcaggtgttaatgtcattgccgtgtcaactactgtgacgctagcactaacgcctagagaggtggctccgtgattgtcaccaagaaacaccagtttactgacgtcaagtgtatatttggtaacatcatcccagttgttatcagactgctttagaagtagaaatttaccatcagtgagtactacgaccacgtttttcacatggtcatcaacatatataattttttttgcttgaacattaccaacgggttcccagacaactctggtgcccttcataaccttgccaaatgtgttgccaaacccagcagtagcgtaggtatgacacttaccatcatggctatatgtaaacatgccttctacctccttggtctcattgagatcaattgtgattttggtaccagtggtatctgtaacatcaggagttggaggcaacgggacctgaagttcctttagagtattagactgattctttaagccgagttggttatttatgagattaagatggagtgatttgattgttccaaactgagtgtcatcagagtgtttccaaagatctgcaccattgtgagtgatcttactgcatttgacatcagaattgaactcaagattatagcagtgttcggcaacagtaaccttgtagtcactagtactgagttcactattatcatcggtgagaaatttgagtctagtaacattatagctagtagaggttatgtctttaaaaggtttatccttagaagtcttgtaaagaagtaaacaactgccgttatcaagtacagctgacaaatacttgaagtctccagcaacaatataggttacctcagtacagtaagcgctatcccggggctcccaaacaacgcttgtaccctgaacaactttactgaacacatagccagactttacaacaaatttgaaaattccatcatcaccagtacggtcaaaatgatctgtggattccatggtgttgagatcgaggatgacgtatttaaattctacattcttgacagtgccagaattattcttgatggtgaattggtttttaggaagatctagtgaaaatgtcttaatggttccaaactggctgtcgtcagagtgattccacaggacatcatctccgtacttgaccttgtgacactcggagccaacgttgaactcataactaaaggcaagacaagagagagtaactgagtaatcataggacttgagaagacgatcaccttcaccatagaacttgagtttgccaatatcatgtttgttaggggtgatatcaatccactcaccaacagacttctgaaacagtttgaaagtaccattattcagtagaatggtcaaaaagtcaccagcagcagtcaccttggtaccaaacaacacctgtgatttccaaacgaaatctgtaccctgaacaatcctgttgaagacaaaattagacttagtcatatatgtatgacaatcacttttggaataatccgactcatcagttgactgtttcttatcgatatcaagggaaatgtatttgagttctagtttctttacaatatcagccgaattcttcacaaagaagacgtttttagcaaggtctagtgacagtgacttaattgttccaaactcactgtcgtcagtatggctccagagggtcacattattatacttgattttcttacaatcgacattggtgttgaaatcaagattataagataaaccggacatagttactgagtacttagaggactttatctcagtatcacggtcaccataaaacttaagtgaagtaacattgtgcctatcaaaagtgatatcagtccacttaccactcgacttctcgacgagtgtaaacataccgttactgagtactattgctagaaaaaccttattatctatggtcttagtagtgacactggtagcacaataatctttggattcccaaataacggttgttccctgaacaattttgttaaagacaaaattggtcttagcaacatatatacgatagttattaatatcagaatattcaaactggtcagtggactgtttcttatcgatatcgagagcaacgttggtggtagtagtggttacgggagtagcggtttgggatttcgatgatgtatcagtatcagtagaggtagttaatcggattgatggcaatttcttatactcagtcaataccagggtactagaggaactacctgaatccaaaacagaagcgccttgggatgcatcaacagcagagtggctaacaccggatgtgaatgtatgaatattgcccgaagtactggaggattcaagacgtttggactgagtgacagaactacctgaagaagttggagtggttacaggagtagtttgtgtagtagcggtatcagattcagtagttaaagtactagaagatgtttcagtagctgttgcagtagtggttggatcagatttagtagttactgtagtaggagtggttggttccttggtggcatcagctgtctcagatgtggtaccgtttgattccttaggtttatattctagtttcttcagttgaccggattcattcttcacactgagctgatttgatataagatcaataaacagagattttattgacccaaagtcagtgtcgtcactatgtttccaaacatcttcattaccgtatttcaccttctgacacttgactccagcattgaactcaagactgtatgaataactaattagggtagttgagtagctagatttatttagagcagcatcattctcaccaaagaatttgagcttatcaacatcatacctctcttttgttacatcggtccaggtaccagatgactgatggaacagtaggaacatatcattactgaggaggacaacgagatatttgataatacacacatatgtgactcgggtaccatgcacttcagtttttgattcccaaacaacaactgatccatgagtaaccttagaaaacaaatggttttgcttaggagtataattatgaatatcaccaatcttggagtagtctaactcactagtggattccttagtggtatctatgtttagggtaaccttggtaacggatgtagtaggagtagattgggacacaggtttggtaggtgtggcagaagttgacacggatggagcagcagatccacttactggagttacatttgcttgagacttaggttgggttgatgatgcagatgctggagttaccttaggctgagtagcaggtctagcacctgttgtaggagttgccttagtttgagcagcagatgtagttggagttggaggtgttgtaggtgttgaagtaccaattgtagcagcagttgccttaggttgactccctcgacctacaccaacacccctactgggttgtgaagttgctgacgaaggagttcccctggcttgacctacaccagtactagatgttctagatgcagttgattttggttgggattgacttgttggagttgtaggttgggatttaggtgtagaggattggcctgtagaggctctaggactagcatgagatccacttccatttgatgaagctggttgagatggaggttttgttggttgggatccttgagctccagtagtaccagttctgcgtcgtgaagttgcagatgcagttgattgtgattgagattgactagattgagtctgattttgagatttaggtgtagtggactgggcacgagaaccttgggaaccagaagaattacttctacctgaagaagttggttgtgattctacaccgttccatttatgtaacaaggcgatataaaacaataattttatgaatatcatacattttctcattcatcttaacaaggcattaaaaatcgcatttttttttgtcaaatagtacctgaatgggggatcatacaaactcaactatcaacatcattactataatctaccaatactataatcacttacatcattaatgttaatattaattactctaatgcactaccaacactaatatcacgatacataactgtagtaatagaatatttaatacacatactgtagtacctactacagtatcagtaataacatggataactccgataatgataataccaatatacttaagaggctcagcccgaaagtgaatattcttatacctgagaaataaaaaagtaaaaaaacattaaaatgagtgagaggcaaaataatctgctcgacagttaatagtttaaaaaagtagtattaagaaacattgagaaacaaaataacacttcaagtgttatcagcttagatcaatgacctaagtacaatatctggttttaaatattgaaagtatttttacaaatgtaattagatgacattctagaattggttaatattcttgtataggttaaccagaaaacaatcactacatacaatttactctggatttttataatcttatttatcaaaatacagttaacattcttttctcccttaatttgagtgttaattcgtattacttaattacacaattatcttgttaacacgctttatgacattagtagtccgagatttaccattaatagtggaaatacataggtacaaattatcagtatgcatataagtcataataactcttatgaatatacataatgtatattagacaaaatgatatgtatgttgtttattctggtttacgaggtcttcttctttttctggtggatgaatatacataaccgccaattctttttgaatatacaacaatatcttcatagaaaaataatacaattttttctcttttggttaatatcattgactcgggataatcgtcatcatcacccttttcccaaactaaactacctttaactacaatcttatgacgtttaacacctggacagaatgtgtatttgaaagatctaaaagctgagatcaatatccaaaattttttcggtattaaaacttcttgatacaattatttttgatttacaggtgtttgagtattgataattagtctcacactcataaaatagttcaacaggttcaattttagatatattttaatgtatcatgaaaagattaaaaatagttaatatataaaaaaccaaactattctatacaataacattgtatgtgttaaaattaatttagccctatttagatggtgtggaattatgtttagtgtatttgagactatacctatagtttatccttcggtacattttattacatcggtgaaaattaactaaaacactttcgctaccattaagataaataagtaaaggaaactcatcgtctttatcagttttcttccatgcagtcagttctctaactttaattttgtagcaattacgcctgggcgcaattcatatgtaaaagatccacatgaagtaaaatcaatagtataatcaccctcagtcaatagaatttcacttccttcggaatcttgtgtgtatagttttaaaaagtctgggatcgattttgggaattttctccaaaccccttcaactttcttaactaatataaatccctcaggattagtaaggataaaaatgttatatcttctcctgtgctttaatactgaacaatagggagttccacttaaatgttcgtagactatttcaccttcagaccttatctgctcaagatttgaattaaataaatattttcctttatctacatccatatgtgtaataaaataatcattatcagacatttcgaccagatttcccccagcgtccttcttatacagttcgattttatgtgttttacgcgacggtttttttcttttaacagaaccttgtttatgacctgatttaactgtgctatctgattgatctatacttggaggttgaataggtgttacttcttggctcagttcttgaggaggagttgcatattctgtatccggttgaggacttggttgttgagtttgtggtggtacataataatgttctgtttgttgaggttcagttacttgaggtggtatatatggtggatatcttggaaaataataactctgataagcaacttctgggtaacacggtataggcctacgaataggtggaggcgcataatactgataactttggtccattgttccgtattgttgggcttgatcttggagttgaggttgtggtgacacatagtactgatattgttcttgttgaggttgagttgttggtggttcataatactgttctcgttcttgaggtacttgaagttgagtgtattgctttggtccatcatgtccatattgtacttgttctgattgtaatgattctgattgatattcaccatacggttcaggttcaatcaatggttcaggttcatgaattactggttgagtttgtggagatccataatgctgttcttgttgttgagttgtaggagctaggtatccagggtaatactttcgtaattcagtttgcaattgtcgtagtttggtatgtaatttttttatttcagtttgtaacttttgtaactcagtttgcaatttgttttcttgaatagattgatgtgttggataatcagaatttatacgaccaattgtttgttgtccaatttccgttagatctgttacgtcaaaattttcttcttcttcactatcgctatatgccactagacccacactcttggcagttggttgatcatctggtttgtccgcacatctcacaaatccgagtaatatgattaacaaaatagatttgtaagttatacgtatattcattattttattgatacaattttattccatgggggatctccaaattaagaacttatattcatttaccaactcaccactaatgtataataagatcaattactttcaatttaaaatgaacgatttatataaaaaattaaaacattaaactacaaatatcacgtttgacatatgtaataattcattaaaaaatattttaaggtaatgttattaaggaatattaagttattatcatattaagttacgagtatattaaaggaatatgttagatgattgatctttatgtactcattttctacccatatcatataaatacttgtattcattacgctttttagcaaataagctaacatgtgttttaaatttaaggaaaacatcccctttaatattaatatggactgataacaaagatttgtcctcaggagttttctcccaaattaatctattattaattacgactttagcacaaggtatttctggaaagaaaacatatctaaaagctcctttttctgttagataaaaactataatgttctttactaaattcaaactctacaccttcagaatcttttccgtaaaattttacatagttgggtattttgcgtgaatttgctctccacatacctgcacgataatcaatataaagaaacgaatcttcaagagcaattacaaacacgttggttgttttgttacatgttaattctaatgcatacaatcttttaggcatgtgaacataaatattgtcaccattatagatcacttgttcaagttcattataaaattcaaactttaatgtagttccatcatcgaatatcagcttgtaatcttgtccttcaatcatctgaaataatccaccatcatcacctttcttcataaaaatcaatgattcagatattttactgggtttaacagctgcagcttcctttttatcatctccaacttcagatttatctaggtgaggaataggtgtggtttgagttgaaacttgatcatgtggtcctgatggaccttctattattccagattcttcatctaagaaatcagtgggttgggttgtgctaattgattctgatccatatgaattatacactatatgtcctagaccatgttgtttaatattatctgatattactgaatctccagctgtttcatcctcaagtaaattctctatctgacttacaatcacatcaaaattatcttcttcatcactgtcaacttctgtttgatccggatctttatcagagcaatttatatatctaattattatagatataaatatacaattataagcaatacacttattcattatacaattgatttaagtttgatccatgggggatctaaaaatcaataaatttatgacttgtacatgtgcatttttaaaattttgataaatcatcatcaaacttaattttaaattagaacggaatattgtaacaatgtataaaatcattattttaaagaaaattaaaagagattttcattaatcaaatttgtatatatgtgtataataactattgaattatcataattctcatgaaaatactccaattattatgttttctattttactgatttattttgcatatgaaattcttctattttttctacatgttaataatttaaacttacctccccttcttccatatataaatgtttcaccttcaaaatacattataattcccgatctttctgtcaagcatattattacaggatatttgtctccaggttttttctcccatacaacgccctctattttgaattcgactcttacacattttaaaccatccacatcaaatttataatgtccctttggagtaacatcaagataataatccgcttcagtaagtaaaactaaattaccttccgaatcctgtgcatataatctagcataattaggatatttaaatacgcacccttcccatatgtctccaactaaagtttccaaaagaaatacatttttaaatctgatagaaaatgtgttgtaacgtttattgtatgtcattgatttaggacggtaatttttatttatacgtttccagacagttttaccgtcacaccgtacttcagaaggtgataaccaaaatctgtacataatcacatttgaatcattaaaatcaatatcatagtcaaaaatatccattttaacaaattcctccctggcatttttcttcaaaaactcaattgattcacattttttaatgtctttagacttttttccttcaagatccttttccttctttttttcctttccaaaatcttcttcatcttcatcaccacctccagctcctccaactgcaccttcttcagtttcttcatcatcagatcccacttcaactggaatatgttcaggttgtaagtgctggtctgtaccacttggttcggttggctgagaactttgttctttagtttcatctttatctttactcggtttatcaccgactaattgatcaggttttggtttttctactcttacaggtttagttgtaggtatatatgacactttttgttgattaggtggtgcataagattgatatggatatccaatataagtaacaggtgatggaatgacttggggttgaggctgtattagtatagtttgtggaggatgaggtacaaaaataggttgaaaactaggtggaggataaataactggtggtaatagattttgttgatgtaaaggatattggggtttatagtgtgtacattcatattttccagattcacttacataaccaaaatcattactttgataataattagaataagaatcagcctgtggttgataaggaaatggtggtatgtatccctgattagtaagaggtccaagaccatgtttcataagattatctgaaacaaccgtttctccagcagctttatcatcatcatcttcaagtatattttcaattccttttacaattaaattataattttcactctcatcactgtcatcttcatttccatgtccacccgctggcaaatttgtgggtttatcagcacaatgcacatatccaattattataaatattatacatatatatgataaaagtatgttcattatttaattggaatttattgttaatcgatgggggatctgaaaattaataattaaactgatttaaaatttgttaaacacaaagaataattttttcgttaatatttcaaattatttgtatcaaacgaataaattatagaaataagtttgtatatgagtaatccactaaccaaattatcatgatcacaaatgaaaccgataactgcagcttttgttcaggaattttataaaatttttaggttcattttttttgtaatttagcatctttaacatatataccttgctttttctttaatatatacaaataatcatcaaagtaaagcacaatgtactttgtttccccgatagacaccattctaagtaaactgtcttgaggatccttttcccaaaccactagttcctttcgaattatcttaacacacttaatatttcttttaatcatatatttaatatttccagatgaactgagttcaatatcataatcattatcagtcatttctaattctttacctaatatagttattttgatcaatttaatgttttgaggaatttgtcttccttttctaatccaccgatctttaataaatctgaatgactctaatttaggcccacaatcaataatataaactttatcttttatattataactcatccacgttggtttttcttttatatccttgtgtttccacacagtcattccgttatgaaaaatttctacaattggagtactgaattcaaatttaactaaatttctactttttttaattaagtaacaatctgatctttttaacttaaaaagtttgcctttatcatttaatcctataatagtagttgatggtagctctggcagtaaaccaccattatctcctctaatttgttctaatatacattcatcataaccttcttcttcattgaattgttcttcagctttttcaaaaatctcttttacttcgaaattctcatctccctccccagattcttcatcttctgattcagactcactaaattcgtctggtgatgtttgagtttttgtaattgattctgatccatatgaatcatacactatatgtcctagaccatgttcgataacacttctagagactactgaatctccagctgtttcatcttcaagtatattttcaattccacttgcaatcacatcaaaattatcttcatcatcactgtcatctccattaccgataacagtttgttgataattgccttgatccgaacaatttataaatcgaattattacaaatagcaatacatatgtgtatattacaaatctattcattctactgttggtaaatgtttattccatgggggatctgaaaaacatttaaagcacttaatacaatggtatataaaattaattataacctaatatataaaatcactttttaacaaattcattaattaaacatttaaataatgataataatgtttaatttatcctgaaaatttaaaaatggttaaccagattcaacaaaagaaaaactttatacaataatattgtatgtgttaaaattaatttagctatatttaggttttgttaaatttttactagtacgtaagagttgatatttcctaatccttctttctaacgttttagtatattttttaaacttaattataacggtaaattttggtgatacataaataaactcaggaaagccatcatcgtcttcagttttcttccatgcagttatttccttaacttctattttgtagcattttacacctgggcgcaactcatatgtaaaagatccacatgatgtaaaatcaatactatagtctccttcagttaataggacctcattgcctaaagggtcttgtgtgtagaatttgacaaaatctggaataacatgatcagttcttatccaagatcccttaactttcctaattaatataaatccttgaccgatgttcagtacataaatatttgttggtttactatgagttagtaatgaacagtaaggttctccatgtgaatggacataaataatttcaccttcacaccttatctgctcaagatcttttttgaattttatttttgttttagttctatcgacatatataacaaaacattcttcttcagtcatttctacaagatttcccaaatgacttcttttataaaatttgatatcatattttttaagtaacggccctattggtttaacagactcttcttcatcttcttcttcaccttgatcctcactatctcgagttctttttcttttaactgattcagttggttgttgagctacctgatgctgagtagttggtggtacataatattgttcaggtgtttgagtaggagctggcccgtaatactgatagcttggttgttgagtaggataagttggtgttatataatactgatagcttggttgttgaataggataagttggtgttatataatactgataacttggttgagcgggatgaggtattgctggtgtttgaggtagtggttgtccataatactgttgttgtggttgttgagtaggataaagtattgctggtggttgaggttgtggttgtccataatactgatagcttggttgagtgggttgagtcaatggtattgatggttgagttaccggtacataatactgataagttggttgagcgggttgactaggtccataatactgatactgtggttgagtgggttgaggttgtggtggtacgtaaggttgatattgatcatattgttgtggttgagctagagggtctacaggtggttgttctggttgataagtataatattctgatgattctcgttgataatatgttggttctggttgatatcctggataatgttggggctgagtctgaggttggggttgagtttgaggttgggttggatattgagattcttgtaattgttgatattgtggttggtattgaggatcatcaaaacgactaattcgttgctgaatgatttcatctatatctaaaacatcaaaattgtcctcatcatcttcttctttttcatcagctggctgatcaggattgttgtcttgagattcaacacattgaattattgtaaatattaatataaaattatacacaatatttttgttcattatacaattgatccaggtttgatccatgggggatcttgaaataaatagtttgttttactaataatatattttaaaattaatcataacctaatatataaaatcacttttaataaattgattaattcaaaatttaaacactgatattaatttttaaggtagcattgtggaaaatactaacaaattacaattagtatgtctataacactataatatcgtatatgttaacatgaattcaggtatatttactatttttactaataggtttagtatattgtagttgatatctactaatccttcttaagaaaactttgctatatcgatgaaagttaacaattacagtcaattttggtgatacataaatcaattcaggatgcccatcatcttcctcagttttctcccatgcaactagatcaccaacttcaattttatgacattctatgcctgggactaattcgtatctgaaggatgatcttgaagtaaaactaatatcataatcatcattagttaataaaacatcattgccttcatcatcttgtgtatagatatttacgtaatctggaatagttttttgagtcgtttcccaagatccacgagttttcttaattaatatgaactcatcaatgctagcaaggataaaaattttagtatatctactaatagctaatcctgaacaatatggtgttccatgtgaatggacgtagataatatcaccttcacattctatctgctcaagatctgctttgaattttaattttgttttagctctatcactaaatataataagatagtcttcttcagtcatttctacaagcattccatcagaatcgttttttaaaagtttgatatcatataatttaagtaacggtttttttctttttgcagacacttcttcatcctcttcttctccttcaccttgatcctcactatcttgagttctttttcttttaactgattcagttggttgttgagctacctgatcttgagtttgaggaggtacataatgtgtagattcttgtgttattggttgagtagttggttgagttggtccatataaaaacccaggatcagttgcagaaggtccttgatgctgttgatcgtgttctgtcacgtagaaattatcatcgtcttctggttgttgaaactcttgagctataggttgtggttcaggttcaggttgtggttgtggttgaggaggctgagatacttctgtttgaggttgtgtaggcagatatgtttgataaaattcttgagttggttgactaactccataatactgataagttggttgttgagtaggttgacttggtgttatataatactgataagttggttgagcgggttgactaggtccataatactgatagcttggttgagtgggttgaggttgtggtggtacgtaaggttgatattgatcatattgttgtggttgggtcagaggttgcgatgtctgagtttgatatggttgatattgtccatattgttcaggttctaataattcctgtacataatgaagttgttgttgtgatggcaattgatcatattgttggggttgaatcaacatctgtggtagatattgagattctgttatttgttgataatctggttggtatcgaggatcatcaaaacgactaattcgttccgcaattattttatctagatctaaaacatcaaagttgtcctcatcaccttcttctttttcatctgctggctgttcaggattattgtcttgtgatttaacatatttaattattataaatattaatacgaaattataagcaatatgcttattcattatactattaatatagctttgatccatgggggatcttgaaatatttaaggtacataatataatgtaatataaaatcaattatgaattaatatttaagcagatttaaaatatacaaatcatttaaatgattaatatatcctgaaatcttataaatatttaaccagatacaacgagtcgaaaaactctaaaataatatttctttatgttaaattaatttaggtgtatttagccactcctatagtttttttagagtatactaattgatatctattaaccctccttatgaacattttactatatccctcacagttaattataacacggagtttcggtgatacataaatcattttaggaaaacctctatcaagatcaacagttttcttccacacaatgatatctttaacttctattttatagcattttacacctgggagtaatatatatctaaaagatgcttttgaggtaaaatcaatagtataatctttattatttattataacttcattgcctccagaatcttgtgtgtagagatttacaaaatccggaatcaaataatcagttcttttccatcttcctttagtttttttaattaatgtaaatccattactattagtaatgataataatgtttgttcttctactatgagttagtaatgtacagtaaggtgctccacttgaatggacataaataatctcatcctcacaccttatctgctcaagatctgcaattaatttatattttctcttatgtgaatcgttatgttttacgacgtagtcatcgttattcatttctacaagatttcctgaagaatcctttttaaacaatttgatggttttagattttataattcgaataagtggatgtcttttaataggttcttcttcatcttcctcctcctcttcatctccatcttcatctccactagtttgggttctttttcctggttgaattggctgttgttttgatacttgtgttttatctggatgtcctattttttgttttaatttacctaatagatgatccatctcttgtgtaacgagtttttcttcaaaagtttcttcaatatcctcacttaatctaacttcagtttgtgtttcatttaattgtagcggctgataaaacccataatgttgttgataagtttgttgagtttgagattcttgtgttacttgagtttgtgtgggcacataatattgataacttggttgaatgggttgaggttgagtagttggcggtacatgataatatgttaattgttcatattgagttggtgaaggttgaaaaataggtgttatataataatctattggttgagtttcttgggttacctgaggtactggagaccaataatgttgatacgtaatcggatattgttgttcttgagtttgtggttgagttacttgaggcagtggtacatgtggttgatattgaccatattgttgggtctgaggttgtaattgttgatggtactgaggttctggtattggttgataatgtgttgtatattgaggacttatctgaacaccagtttgatgttcaatttcagttaaatttgaaacatcaaagttattatattcttcttcatcactatcagtatgtggtactagacccacacccctgttagttgattgatctgtaggtttatcagaacaatctgtaaatttaacaataaaaaatacaagagtgtatgtgtatattacagatttattcatcctatagtttatttttccttgatccatgggggatctgaaaaatatttaaagcacttaattttgtattatatttaataatcatttacagatttatactaaacttagattacatattagattgttttttatagaaaaattaattatattaatgaatcaaatggatgtctcttcaaataatatttgtaaatgaataaaataaataattcaatttagtatatatttgtcagcagccattaaattaaaataattttcgttagaattaaacaatatgttttcagaatatatttagaagaaattattaaaaaatttacagtcattaaacataaaatagtgggaacttaattctagtattttttacctttacttataacacacatccacattccattattctttatacaatctaacacttttgtataaaaaaacactctaaccatattatactgagttgcataagttataaattttatatgaccttcatttgggtgtcttttatagactatttcatcatataccataaccattgtacagtttgtttttttcctgaaaacatatttaaatatataattgacacaaagttcaacatcatattgctcgggactgagcttaatatcatttcctccttcgtcttcagtatagaaactgagaaaacttggaataaaaaaaaccttcatcatccacttttgaaagtaaggcttaaatgataaaattttatcacaaaaaatgagattgaacatgtttgtatgttttttataaatcaaactaattgggtatgccaacctgtctttatttacccaaacaaattgtttattttggtaaaattttgagcagtttccgataaaatcaacctttgtaaaacttttacagtcaatttttaaaactaaatctgatttattcattgggcccaatgcaataattgtcaatactatataagtcatcttctctatctgaagtcctcataatatcaactatatacttaaatccattcatacaagcataatagttgagtctgttaaatagattttctctataatatggttcatttatggttggcataagtactctgtgataccttttttgatgtgtaaaagcaatatacagtcttttattataggtataaactaattccaccactaatggggagttattataactatacaggcatactccataaagctgctccttgttaggtatatttaaggggtaatagtttttattattttcataatttcctggaacagcgtcctctattacacgggttgtaagacctccaaagccaaaacgattttgaggtccgtttctaagattatttaatctgtatgaactaagatcgtagtatcttaatacgaatttttctagaccattccctgataaatgaagttggttaacagaaacattcaatgaattactgtcgtagtctcgagtttgttgtatgtcaacatcaacaagcttatcagagtctggatgtgacttatgatttatattggaaatagttttctccgagaatattgcctcaacagatagcgatgaattactttcatttaatagtataactgatgacttttccagatttaagtgtatcacagttggattatccaacacccaaagaactgaggcagaaattaaaagttggtcgctagttagtaaaggatcaaaatatattacatcatcatcatagtataattcctttaacaaaaaaggtttactaggtttatgcttgtaaaaattaccagaatcatccctgtaaacattgatctcaattcctcctttgcgatatttgcttatttgatcaatatctaatttaaaacaactagaacacaaactgaataaccaaatcccaaaatataacaaaaatgtgtaagtatttttcatcaaaattgaaaaatcaaacacacacttatctgtataagaatttattttaggaatgagttataggacttgaacttgtattttttattcatatataaattataaaataattatgaaactaagcagataattttatgcttattagttgtaatagcacttctaaatacccttagtatgaccctacaatgaatcacaataatcgctgaatctctccagatattgtataaaaatttggatttacacttgtttaaagtttaatcactaaggattaacatttcgactaagaccatattttgaaaagattggttttggtgatactaataggcatttcaattttcgtgattcgattaaatttaatccaattttattacgaaaatttagtttctactaaccgatttatgactattacattagttgaatatatatttgtcatctacatttccagtccgattgagtagaacattcgcttcaaagattatggtatgatatagtaataatttataaatatgcaactagaataatgggtttaagcgagttactaaccacgaattctgttaaaactaatattaaggcaataatttaagatttattcattcaatatactaaagtttttaaaggtgattcaccagaaacctagatattaatgaaacgacaaaaaattttagaacaatcattgagtattttagactgactttaattaattaacataaagatgtagagtatcatttatgatttcgattgttaacataaatcaattttgattactcttgtcggctcattgttccactctataattgctggggtttttattttggggttgcccatttgattcttatgacgaaaatttatatttattatttaatttctgtctctgctgagacaatttaacttgtaacacatactaacaacttgtgttcattataattttgtaaagtccacttccacatacactcttttaatagagtttacactatattaattcctaggtctttaggcttagcatccaatttcctcaaacgtttcgtcactgattttaacatactgagttcaaatgattatcatcatctcagaataatcccaaactttactacttgaataaggtcaatgtttaactcaattatccccttaccattaattgtcatagaaccataaattgacatttatttaacaactattcgattttcaggaaattaattgataattatcgtttagagagcatcttattctaatattctacgtaaaaggtcagcaatacttgaaattctattatttctatccatacgcagatttgaatgggaaaacgtagacaaatttctgatttatttaacagtacgttccaagaacccgatgataaacctgtttccgagcaccattactgggaaagtaaatcatactccaaaacctactttaataacaaatctcgttttttaaaatttaggtattatgactctgtcactgttttgaaattccttttctttcactgggtagctaaatgggcatctcttctttctaaacaatatgtagagccatacaagttacatccacttcccgttgctgaccaagtcctgcgttggcatccagttttctccaagaaccttagtgattgtctcattgcattggaatcatatgaaacaagacaatacggacacccaaataccagacctaccagatctgttctattgagagccctattcctaacgttttggaagagaacaacatttggtctcctaggtattatagttactaatgtccttagtatgagcattgcactactggtcaagcatcttttgggcatcctgaacactagctctttcactcttctgaaaatatttctgttcctatttgctgtaataggtcttcagattgttgatgggcttttgattgaaaatttcagttattatcttcttcgattaaaaagcgtatgggaacattcagttgcaattggtgtgtttcaacatggcatgtgctatagaagaaaatatttcaataacattaatggttcaaactccttgagtgtttgtaacggtgttttacatacctgttctcctgattctgattgttccagaaatccattgttttgtccagccaggaggtaccaaaacaaagatattactcctaacatgttcacgtttgagtattatgattgcttctacgtatccctatttgttgaatcggcaataccaattgttaactttttgtcaaactttatctatggtgttgtgttgatttccatgcagattaagattaatttgtgggtactgtacgtaattggccttgttttctgctttttaatggttgttgttgagattattaatacttacttatttcattttatttgccttgtcaaagattatagaatttcagaatgcattgaaatcatatctgagttacctctcatcaacaaattactctacgatgacattgctattaacataattactgaaactaggaattctgagttacttctgattttggttagattattttttacattactcaataagtcgttgtgcgttatttgcaacaatgtgacattctttgtactgatgaattattttgtaaaatctgtgagagacgcagaggttatcaaggatgttgacaccggcggttttctatcttcattctacatctttttcagaattatcaactcaatgttcatgttcccgtatgcacttggaagattaactactgcttatatatcatacaacagggttaaaaaataccttaaagactgctcacctaatttttacatcagtgataatagacacaccgggccaactgaaatgtcctctgacctaccagatgttaccactgagcttgcgaaggatgttgtagtattatataaggatgcctcatttgcatgggtccacaataggaaagattttgccagtaagaacaatgaagttcagctgaagaatgtgaactttcagctaaagaggggtgagatagcattaatgacaggtagtcagggttgtggcaaatctaacttcataaagtcagtacttggtgagatgacattggttggaggttcaatggcagtagttcctcttcacacctcaatgccaatattttacgcctccgaagaaatttggcttaaagaaggaactattagatcaaacataacatttggacatagattcgatgaggaaatatataacttagtcatcgagaaacttgagcttgaaactgatatattatcttgggaaagaggtgacttaagagttgtctcagataatgctcactcactaagttgtggtcagagagttagaatggagatggccagagctatctatgcctatcttgtattcagcaaggtgaacaaggattacaacagaagccaatgttcattcctactatgtcttgacggatcatttcatggattagatccatatgtatccagaactgtattcttcaacttgttcaatgctaagaatggtgtactagttaaggacgatcttgctgttatagtttcatcatcactaaccttgctggataaatgtgtctcacctacaaaattaggtcatttccctaagattcccgtatacgagattgataacaaatctgttcatttcaactgttatttgtcagatgttttttcttacaaaaagacatcaaatgcctttgagtatatcacacctccttcaggtccatacgaattgaatttctttaccaaggatatgatgaaactttgttattcaagctctaacaccagctcatctaggaatcacttaactaaatcaaagtacagacgctcactaacttcaatcatccaggaatgttattccgatgataaatttaatccatatctactatatttcagggcagctggatttacgtttgttctattcacaatcttttctttggcatcgggtgttatggataactctaagttcgtccttgcaacaaatctcacagattatatgttcaaaaaagcaggggattatgacgatggcgccactgttgacatgtccgatgttgtatcgcacagcgattctgccctaaacgtaatgctgattattgtgtcagttattatgggatgttctctagtatcagtgttacttttcacggtttcaagtttaatggcatcaagaagaatacatgaatattgtctcacctcagtcttcaagaacagctcatctgtgattaagatcaaaaagcagataaaccaaatcataacatatttttcttcagatattgttttcgttgatgaatgtattggagatatgatctttaccaccttcttgtcatttatacaaactgcgatttccattggaacactattttacacaattcccctatctgttccatttatttttatatcattggtcattgcctttgaattcatagtattgaatattgtcaagtcatttaagagcattcagctgggatcactagaaactatgtcacacattaacacaacgtgtgaggatgccatactcggatcaccaatttacagaagctttaaaaaggaatgggagttggttaatgatattattgaaagaaatgattataaaacgaggtgctggtttttggcaaactcctttgcaagttgggcttcagtgtctttcaattggttattttcacttacaaccgctctattcctcacaggcctgatcatatttgacaagtttactgactttaagatgaatgttggttattttggattaggtttatcacttagtatgagtgccatcaaatctttcaacaattgttccttttgttttgccaggctgcaggtttttatatgttcacttcgaagatttttgtgctttattccccccggatccaaatacgtatttgacaaattccgcaatgttcatcaagaggatttagttatcagttcatcaaaacctgaggaccaaattaatacaactaacttgcttaggagaagggcaattgaattcaaagacaccaatcccaacttcttaaagaggatgttattcaggcctaagttcaacttcatgtacgtttcgaattatctcccatctgaacacaccggggtagtattgaaggatctctgtgtttacaccaattcactgatgaataaggaaggcctcatccttaacaacattaacgcaacacccagcaagtctgatatcattggaatcattggcagaacaggcgctggtaaaacaactttgctatctgtgctggaagataatgttagaaatcgaactggtcaagtcctgcttgatggtagagatttacaagaaattcccaagagtgtcctgagacatatagttggcgttcttccccagttaccatttgtcttcaagggttggaccattagaaggttcttggatccaaggagactatttactgatgatgacattaatgaagctcttgaaaattgtggtcttcttgattttgtaaattgccttccaggcggtagaaaacttgatactgtagttgtacccaaaccacttaatactggcaaaaaaattcttgaccaagatccaaaggaatcttttaacaggggtaaggaatcttaccgcgaagacagctcaatgaccatcgatgctcctaaatcaacaggtacaatgttatctgtaactcagctcagaacactttggtttgcgaagttagtattgtgcagacatcagtacagaatgttaatcattgatgaaccaccatctgataacatttctgaggatggctctgaagttcaagatatgggtataccaatctatgaactattggataaatactttaaacactgcacatgttttgttactgcacacttctccaaggttctcaaatcttgtacatccgtttgggtaatgcatcacggcagacttataaagacctgcagcgcttcagaagtatccaaaaatgaatcaatctcaaatgtaattgaagagatggttaccaagtattcgaaccaaccttaatgtgtaatatttaagattgcccaatggcatgtgtaatataaattttccgtctataaataacatatgtactacactcacaataacaaaaaactaggtaatattctaagctagaatagaactagattaattattaaaatgaaatttgatataattataaataaagtagctaaatttatgtaatgttaaagagtatttggagttcagaaatgagaatcgagtccctgaaaatgtgaatttagaaattatccaggtggccaattgaaccttctaccagacataagatgcatatgtaggtaaaaaacggtttgaagagcccctgggccactgttaattacaactctaaagtcacccagattattctccttagctatatgtgcagcctgaaatattggtgttaaaatccaaaacctacctttaccaacatatggcctaaaaccttttcatgacgctcggtagcatcacttaaactggctagaccgtccatttccttgggaattattaatatgtggcttggagacgcgggctgaatgtcataaaaagccagaaccaggtcatcctcgtaaacctttttacaaggcaattcgcccttaacaatcttgtctaatattggctaattgagtttaaacttacgaaatacagttaattcttcggggttttcagaattcggcatggattttaaagcagaaaaactacttttcaaagtatcaaaattactatataaaaattatacaagattatacaaatactatataagatcgattagttatgttgttacgttttttttgttggaatgaaggtaagttgtttgtaaaatggtgtaagatttagtctggtaaaaaaggacgaaaccaaccaaaaacggcttgaaatcataaaaacaaaaataataaaataatatatatgaaacatatatttcttttaaactttttcaactccagattatgggtgttggaatcattccgacattgttggtccaattttaaaaccactgcacatctcccaatgaatacccattttatttttcttcataaatttcagtggttatctcaaaatattatattatatccaacattattttaaaccattatttatacatcaaatgacactattcgtaatatatgatttaatagatattacattgaaaaatcctgatttaaaatgttttaacgagattccacggggcaaactgctttagaataactaaaaatattatcacactattgtattattactaaactattaataataactaaataacgtgagatactgtgaattaatgtgtttgagtatgttttttagtgtttgtgtatttttgtccaattctgacatcagaatcgcgtagagttgagttgatctttgcttggatgcctaagaaatataatccttaaaatgatactgaaattgctgattcaaaagtctccaaaggcacgggagttgagccattcttgtaaatccaaagaacctctccaaactggttaaataggatagacacctatatattactcattaatttactgttaaaatattactctattggtagtggtattatgtagttcagtagaaaatgtatttactcgtgaagaacgaatcatatgtaactgtttaaagtatgattaagaatgattaaattgaattcaaaaggctacctgggtcttgagtaacttttcctcaaatgaatttggttccaacacgaacttatattcggataaattatggtctaaaagtgagtgatctggagcttccagcaaccaaacagtaacgaacattggaacatgataaatactgaaattcgattatatactgataaaattacttaagaggagttcctttatgccacagaccataaaacgaatgatttaactcatctgatagttccatcaactatagaatttattaaatcgtgtaaagcttactggtttacgataatgcaaaagagacgctaaggctgataaagaacaagcagatagtaaatttccatcatcttgtaatacatgtacataaacccttaaagcccagacctaaaacattagaattagggtttaaatttacttgttttccacttgtaatgcaaagggtttccaaatccaaacaggacgattccttgaacatattctccaagaaatatatcaaattatgttcctgatcagttgttttcccgggttcataactttcagaagtaaaaggagaagtttcaacgttaaaaaataaaaacccctcatttggcctctctgaattaggttcaacaatttcctgagaaatacaggtaaaaacgacggtatttccaaaagaaatcaaggactaaaatattattaaaggttatgaaattacggtgccgggaggtccgtcaaagtcaatactgacatatacgtgtgaatccagtgaccttccatcgattctcaggccatttttgagacaatcttgtccaatcaaaagagttgaaatatcagaatttggattttggagaaaatgaatctcattatcagagataatcatatttttttgatcctatatttttccaataaaatatcaattaaaaacataatggtatattttaaaataaaatagattattaataatagtgttattttgtggaatattaacacttttgcctcatttcaattatttcttttattacacactatactatttactatatacatattatatgctatttatttaccttaaaatcaacacacaacccctatttattaataaaattattatatatatataacaccaaaataaaccctcaactattatacagcttgtcaaattagtccatatgtgtgtatgagaaagtatttccatcatctgcaaatcctgtttgtgttttcacttcttcatttccagtttgtttactttctaatgctgccgcttctatttccttcctgtactgcttacgattactgaacaagttcgctatacttctgatcatatccttagtgttaactcttctccaaagccttgagaacactgaacttatagccatgtctaatctatgcaatatcttaaattgtctcttaagtaatgtccagcctgcataaattcccatcggaatcatcatatatggacccgtcaaagccaatattgttgatgaaaacacgtccctaatggctactgaacttgctgaaattgccagattcgatatcggctcaattgcgcagtgcatgctcgggggttttaccaaataccaacacgtttcaacaggtgggtgtcccatatccacagcatgttgtgctatatccatacactccaacactgtgtatgttgccattgtacccaatgccaaagcagagaataagattttggtcctatttttcttcctttctttcatccattcagttgtgaaattaccaaaataaggggcttgaactttcatcgttgttgctgtatatacatatcccattctattcattagaactgaggccaattttaatatattggcaatgtagaatgatttaccaaattccataacttccagctcctttttcatagattttggtaataaagtatcataaaagccagtccaagcgtctcctttcaatataaatctaacattattcacatagttagggctattcaattcggataacgatgtggtggacgatagatttttttcgtaagatttgatagaccctggattacgtagtgttgatattgtgaaggctagaatagctttccaaatggccccgcaatgctccgaacacatactctgttgaaactcaatccttctctcatctacactcatacggccgtagagattggagattgttggcattccgtaattgagaggcacatcaattgggttacgtgaagtcctgttagtaagtacttcaactaaatcctcaatcacgtcaataaatgctcccgttaagttccatgactcattattactaagtttacgttgtaatttatgtaattcatcaacaaccctcattaccttgtctagattgagtttaataccgaaccaaatggcatgatcaacatttttttccgctcgatcgagtatgaaattaccgaagttaacagcacgtctcaaatatttacgtaaatttgattcaatttttggtgaattaagtattcgtccaaagaaaatagtgttttctatattctgttccaaattgtctctgctatcctttactacctcatataatatatgatttctaccttccaatgcttttacagagcctaattccaagaattcattaaacgatttaagaatttccgtattgagggatttgtcccatttaacactctccatattatgaatatgttgaaaatcagctattttcaaatcatcctcattgaggtctacgtgatttttcagtttctcagaaattgatctcgtatatccatcatccgaccagtttttaatcgtattatcaataacactaatcacaccacctctcctgaagtagaagctactattaggatatgcacgaccccaatattcagcattttgtatgacttgtaaatttgccattgaatgtgttacaaatgtaatagattcaagagcatctctgagaacttcagatcttactaattgtttcaaagtgagtttagtcttctcacgcatgaactgttttacgaaactgcctttcaaaaaccattttacaacttttcgtaatttttctggtgcaaaaatagaacttgcatcaacaaatctggaaaatggatcagcctttcccagcttttccaattcctttaagtagtcttgtgcgggatattttttagagaggatgttatacagaaaaaggtgagctaaacccacactacttgaatcataaaactcacggaatcgattagaaattgaaccaccgagtaaaactgatggagagtaattataagtctcgtgcataagcgtcatgttatcttcaatccattttttaatgccagatgaggccatatatatatagaacctatggctggcacgatatcgtagtatacgtttctttttcttctttttttcaattccaagttcataagggagtttgttatagtattggacagcgttataaggtggaacaatctcagcactaagattcctaccaattcttttcttttcaactgatgaattatgtaatatatataaaaatacttttgttgtaatcggcaaaccatgttcccttcttttttccagtgaacattcgatgatcccacattaaagtcatttcgaaaaatgaacgaaaccgtcttggatcagataaaattctgaaccaggaggttggaacatcattaacactgtttatatcacctacaaatatatactattatatatatacatgtatgtatggtgttatgtatatgctataatagtatataactatggtaagaatatgtaaaagtatataaacgacaacaaactcatcataagaaaaacatcgaaagcttctgataatcttctcctcaattctgttacttctgtttctggtactcctctatatgtttcttctcccactagtacactgtgttcaaaatcacatctaactgctatcgttccatccccaggattagaacataattttgcttgcattcttttgccattaattatcgaacccacattaggctcataacttcctcctttttgatttaacaaatctcccatggaatccattgtcaaattaattgatcttagtaatacttccaacatctcacataagaacacaccatcagatgaaacattatgttcataacgtttagctgttgatatctttttatatacaagaccattagaaccgcgagcatatcttgaacctcttcttattccacacatataatccaatctgttaactgatcctccgggacctgatctcaccagttccaaccatgagtaaaatctacgcttcgggtaatctgagaaaaaggactcgtactcagtatatcccaacatcattgttgctagatgaccaagaataaatggattattaccagatacccaaaacatatctgctcctaaaatgtttgcaactggtgctcctgatcctggagttccatctttgccttttttaactatattataaccgagggctttggctaggttttcaagtcttgtaactgaatccctagtagttacatctgacactaataaatacagggttttaagaagagtggtttgtcttatattagcatctacctcccaactctttaaacggactcttgttttttccgactcatttttcaactcagttatttccttttcggtcaaatctctaccattcaacgccgttggttggggggtaactgttgtattgggcgcttcaaaaagctgtaaatatgagggtttaattggtgtgtgtaattcatgatcaaatgaaaccacttcagaggtagtagttgatccgtcaaagtttgtaacacttttgagaatcgggtttgtaagcgaaaacaacctttgtgaaattgctatataagttttaaaatagtttacaggttgtcctcttagtaaggatttaaattctgggcttaaactggcgataaaaggtctgagaaacttatcaaaacctattgagtgttctaattggttataattttcctctcttacattttcattaccaaatgtataatatttatataattttcttctcagtactttggctttaaccttttcccaatttttagccaaaggatcttttctaacaacagaggcttttgtaccttttctaggctcatttgtttgatcgtagtctttatcaacatttcctgccaccttttcgctttcagtttcagtttctgtttctgtttccgtttcagattcagactcagaatcctctcccaaaaccttgtccttaatcatcttattaacagttgttattttctttttaatagcttcagtaggggttccttccctttcaccccttttcacctctttttcgtcctttttctctcccttttcagcatatttactttcgacttcattctcaatattaaatttattacgatgataattattaattgtttcattcatacttttagagaattcgtacatattagacaacacatctttggccattccaagtccattagcagtctttttagctcccaactcaatattcttggcaacattctttaaatcctgtttatcaattgctgataatgccaaggctccacttatattcttattattgaaataatgtgaaataagaaattgtattaccaaaaacctggtaatcaagtttgtaatactaggggaacctctttttttaactctataaattgtatatctcatttctattgcgatttatgactaatatttaaactttgagataaaaactttttactcaaagatctacacattcacctagttttcatatagaaactctcttctacacattttatttatgtaaatagttcaaatattcattttcaccagtgaaaatcaatgacattagacaaaatcagttatggattgaatgcactcaggtgcgtgcatttttcctttaaatcaatcttatttagtttttaaataaattaatttctaattaaaaagatgaaataatatacagaataattatttcaaagggaattattagttatcatatttggttccggagtaatttgatgatttcaaaaactctcgaaggaaaaaatagattagacaaattaaaataatataaattattaaaaaagattagaataactagattacataactaattatcgaatcttccactaaattattaatccaattttataaaaaatcatagattctcccattattaataaattgctaaaattgatttctgtttgtaaagttattaaaaaatttttttacccttaaaaaacaattttgtgaaattttaaaattattataataattttgttcatgtgatttagatggtgttgtattgattttcgtttaatcaaaattttactttaatatgacaattcatcgcaatattttaaagcagaaaaataagccgtttaaaaattctaaaagtaacaaagtaaaaaaaaacttttccacttctgctgttcaaaagatatctccaattcttagtaggaagaataaaaaataccaaataatttctaagaataagaagattcgcttgaatttgcaagaggaatctcccagaaacgtgttcgtccttcccttccactctgagattaattcttttgaagttatcaacgctctcttatcgtttcattcatcaaattcttccgctaaatccagttattctaaggacggctggttattatcgcaaccaatattgttgaatcaagcctttactcacgacggtattcctcgtcgtttaattttctacacatgtcctcgaaacctcactgacattctctactctgcgtccgcttctgatattattctctgcctattcagaggtgcttctcaagattcaccagctttcgacgagctagggtttgttcaaaacactctaccattaactatatactgtattttatccttaattatcctgtttactagtcttttatattttatttaatattattttggctataattaatttagtgtataaacctatataggggttgtataaatatattaggtatagaatattgagttctttgaggttacagggcattccatctccggttggagtgaactttgagtctgctttacctggggaccgtcagcccagttcaactcttgttcgtcgttactttcattcagaattcggattagacaagtaagtgccaattatttatgtttttgtttagaaaatttacttctgtattttctgagaaggatttacgcacagttttatcactaattggctgtgtttcaacttcagatctctcatggcgtagggataggggatacatgttatctctaaaccacacttatgattctgataagaaggaattagttctcgagggttatgtcaagggtttagggtttactgtaaggcaccctgttcatctgacttcatttggagatttcattattaagaagattgatttactgtctgacatatgcccagccagtacaaactcctcaaagatttcagttgaaaaaacggttgaggaactgcataatgaggatttatcacaactcctgtcagaatctgagtgtttaaattacgtttcacatgaaaattctaattctctcgacatttccaataatgttcaaaatttgaacaactacttaaatgatggtaatcattttcatgaagattttagcagtaaattgaggattaacaagatctccgcagaaggtgaattgttacctgatgacaatgagatggatcaggacacttattatgactatgataatggaagtgaaggttctgtattatctgatgaatctgattttgacttggatgacattttggaaacctcttcaaactcctctaagaaaatcgaatttgagcagagatcacttgaggaactctctttcccagatgaagttgataccccagttgatgttcttgctaaagataggtaattttcacttagtttcatcactgttttactatatttatcatttaatttatttataattttatataaattatcagcagctggggtttaattgttgcgtagatttcgtaaatatcgttctttgaagaacattcgttcttcagtgtgggatccttatgagtctctgcctattgaatattacaaaatcaacgagtttgagaattttcgggtaagtttacacatttttcatttttacattattttaaggccaccatgagctcatcaaaaactcagttaaaaaaaagctgtgagattacaaacgtttccggttcatttataagccttacgctcgttaatttcccccccgaagattatgccactttatcatctagttcccgttttcctctcgtttccacgattttaccctacgaacgcaaagtttcagttgtcaattttaacgtggctcgtacctctgaaggacctgatttgctcccctcaaaaactcctcttaatctcttctgtggttttcggaggtatttctatactcatttttcatagttatatcctatagttaatagatataaatattagtcgtgtacaacaacaatgagtgcaatagttaccgctatggtaatatggttatagatttccctcaattcctatttacagtaagagtattaatgttgatcgtgggaagcgaggtctttatgatcgtttcttcaagaaaggcgacaattgcgttgctaccatctatggattgtcactttgtccacctaccccagtattagctctcgatcaaagtactaaactattactactttacctaccataattatatatataattgatatttagtctaatttaaaaaatatgtagacgagactgttttgtttggaggccatgtttcaggttctgagccttgtagaataattatgaagaggatacttttaactggttatcccatgaaagtacacaaacgacgtgccatcgttcgttacatgttcttcaatccttctgatatcaagtttctttctacttatttactaattatattactaattattattaacaatatatttacgattatagatactttaaacctgtccaactatttaccaagaagggtcttcgtggtaagattttacagtctttgggtactcacggccatatgaaatgtcttttcagtgatttcatcactcaagatgacattgtatgcttaccattgtataaacgcgttttccccaaatggaaccctcatacctggaccaaacaactctaatatcattttcacactactctactatgtatataatacacataccaatatatatataatatagtatgtatagtatagtcaatactatacttagtatagttaatagtatagtagtatagtagtatattataagagttcgatggttttagattcttgatgtttatcgttatcatgcaagtacgagagaagtgtgggaatctcctcgtgttcctgttcggcgtctatgaatcccagttctggttcaaatcttccacccaaagatgttttcctctgattgagcgtggagtagggcacgtattgaaaactcttgaaaccgtagttgtggaatagatgtttgaacctctcgtcgttcgacacatacaccactgcagccataaacaatgccaataccaacataaacgccaacaataattttgattctaaaacgtctttaacgaagttatttcataactatttaacaacataactaagaaaagtgtggtcctagagataattcctaggaaataacccagtagtttatagctaggtagaagtgagcaagaaccgtaacgaacccttggaaagaggtgaatgtgggggacatggaacagcaactagatcgggaacccatccacccacacaaacgtctcctggaaccttccgatatgcatttgtgtagaaatatgatgctgaggtgcaaccctcacgttccaaaaagtgtccttcaactttacacacatcacttccaattgctcttgtgaatcccacttcacattcataatcctgtcttgtacactgacaaagttcacgatccactgaacgcttgaaatctctaccgttgaaacattcactcgcctgttttcttctcttatacgttacttttttaccgagtaaacactcgtttcccgtcatgtcacgtggtacccaagtctcgtaatcgctgctactgctgttgatagcccaaatacctctgcacgctggctggttcagagttgcgaaatctaaatgaaacaccactccgacaccatttctgtttccatacagcaggaactcagtagctgatgatgacggctcaatcacaatattgttaacggagagatcgtgttttgagagtgaaaagtcgaaccaacttgctccttcgttccagctaaaaaccacttctcttgtcctgctctggtcttgtgccatgaccaatagacctccatgatcaccaaactcgtatataaacgcccctttatgtacttcacgccatgttaaacctccgtcacggcttagaaatgtgttaacattggctgcatcaaatgacaaatggtctccaacgttaccagttcctaatattaatcccactgcattttcaacggaataaaatggagcgaaattcttaaactgcgtaataccgtgcaaatgcaggtaacatctatcgggatcacactggtattgttgtccgtaagaatcgactttagggggcgttaaataattccattgtgcccctttattgaatgagataactgtacggacattagattcgatttttttatgtcccacattacgtctcttcttctcaatctaccgaataacaattataaaaactctattatttatataacaatggtaactaaagatataaatgttaactaagtataatagtgttaactgtataactatatgtataattacttgtgtcatgttgtctgatttagttgcaacatttccgttgatatgcgttttaaattgctgtgatggatccaaatatccaccagaatcatctctaaaatttgccaaatagacaccctccatagacaacaccttatcaaactcacattcaccggacgatgcccttacattattaggcaacgacaatgaatagttaagaccactggcgtcggaaatgtacacgttaccaacttccacatcacttccttcatagtggtgtccgacatggataataactgctccttccgaggtgtcaagtattgtataacttttctcatccaaatctgtactaattcgtgcctcattgaatgtaacaccattatcagtactgacacacagctttacggtttgtttacttgagtcagctacacgagctacaaagatataaccattgctaacgaggaatttgttaccacctgatagtagttgttgctgtgttgcaccatagtcatcagtatatctgaatgagatggcgtcgttccagccgtcttgtttgggctggtctccaaaggccatatcgtagcgactaaaatagatgcggtctgcacttccgtgtgtcggatcaccccaactaaattgacctacatattcagccacccgcttgaagctggctcccaggtctcgactcatatagaccacatgtctgcaatctccgccggtacctttcgataaacaatcaccctcccatgtactcagaagcgaccatgacgctttagaagggtggaaaaagaacatattaacctcgcctttgaagcccaactgcttaaatgtaagagcgccatcagaggatatgtaatgtgtgttaccagtacccaaaacggcaacgacattcttgtcagattcacatacaaacattgaatctacatggaacttatcaacactactgctactattcattgcgttacttacagtgctaacagtattagaagtgttagacagtgtattggtaatttcggaccattgtttaccagagttggtggatctataaatacggcctgatgctgttttgagtaacacgaccctgttttcaggtccgcaccagaccaaatcttcgactatagaatcaaaactaatttcggtaactgaaacctttttcttcccaacggcgttcacgactggttcgccgttaacgcttgtatattccaaactctcaccttccttagcggttatacctacgtcgtccacacaccaaacccttaaaccccaaactagtacattaaggataataaatgtattaaaacggattttcatcatttaaaagaatagttaggtgaataaatagagaaatttgcgatcgagaaatcggctcaatttacggaaataaatttacagaaataaaagtcaaagagccattatttgaaaagcaagagaatagtttcaaatttacattttacacaatgtcacaaaacttgaaaaattaaatcacttacaacactttcactgacattacaataaaataacattattctaatatttaaaatttggacaaggatttatttcactaatctaaccagttgttgtattatcgggcatccctccagaatcaaacatcaacctaacttgtttcctcaggcacaattcacaacttttacttaaaactcttgaaaaaaattgttagttatatttttattagtgtaattctgtctatttcacaaatttacaagtttccatccttccaacactactgatgtcgtttatatctacaacaattttccactccttttcattcctttttccaaaataaaccatattctttactatttattagatatccagtataatatatatcatatatagtctattttaccatatagagtactttacacggttagtgatattatattaattttccacgtcttttcatattacttcaattctatgatttaactcgttttttataaatatttccatcttgacgtttttaatctagaatctcgtgaataatgtgaaatcagttttaacactataaactatttcattaattaaatcatgtaaaaaatattaaacttccctacacattagtcttctatttggtttaataaatttttgcaattttttattctaccataaaattaaaattgtttgtagtttcatcaatttatggtaatttcatcatattatattgtgaaatgtgtacgaaattagctgataatttgaaaatgtgtgaattgaaaaagctgtaaaataccttactaattgtactgaaatgtataaattaagtatttagtagtggatttgatgtattttgtgaaaatctgggcatttgcaatttttagcaaatctgtttggtgtttctttacttctcctgattttacgcctaaaaatgaagttccacttcctaaagattttactatacaatctgttgacgattatgatcaatctgaactaaaggtatttcttacacatttactcctagttatatgattccaacttattttttgtgttaattattcactataacgggcttaattaattatttcatgaaagttatgttcttaaaatataggataattatttgtagaaactaaccgagtatagacaaagacatcgcaagactcttgatggtgctttatgcgcagcagcatttgtcagaaatggaaacacatttactgattgtactactactgaagctccagatggctctgttggtatttcattagtcatattattcacataattattacatatgatatactggattcattattcattatatgtataacaagtgtttgatagttgattaggaagagaatggtgttatttggaggttcagcttataggcactggagctagagattgggacttttgcgctggagttattgattatgatgctttaagatataaagctaggtactattatacacattttttatatatttactctaaattagctacatttaataatattctgctgattaaacactgttcagttccttaatggaattgagaagaatggaattggaacaagcgtataggtcactggtgagggaagaaaggtattgaaaaacatatttatttaatgtgtaggagagttgacagtacgttgtcgaagtatgaagaagtttgcggatcaggtgagcaggattatgagtctgacattttgagactggagacctctttaaaaggcgtagatagagccattgcacaactaaaagctaacagctcctcattgctttcactcactaacagtctcgattcacttgaagacgaacgagatttactcactaaatctgctttacataatcgcaaaaattgctctgtggttcggggttatcttgatcaagtattattataccacaatttccactatgattatatagttatacatactattcccaagaacttagtaattccaatatagagtaaacccgatggactgagagcaagttactataataacccttatttccgaggagtcccctcaggctttattgatcacgaagatgtgaacttgatgtgggaggactttgttcctgtgtttggggtacctcacgattcgttttctgtgaggattgaggggtttctaagaattccttcaactgatgtttatacgttctacgtgaggagtgactgtaatgtaagactctttttggatgaagaggtgatagcgtctcaagggtttgaccctgagtctgaccgtggtggcccagttgtaactcaaccaatcaacggtaggccaacaatgaacgtttttgtcaagtcgaattcattccacttaattggtgggaaacgatatcctatcacagtcgaatattcccaccaaaaagtacttaaatactacaactccaatatcgctagacttgctctgagctggtcttcaacaagtttcccagaacaaattatcacttcagaacacttttttaagggctcaggacaaaattcagatatttcaatcagtggactcgagggccaatattataccttgtacttttatttatttattaatatgcttaggagtatgttggaaaatggagcacaggcgttcaaaggagtgtctaactttgtaattgcagatgttccggggaagttcataggtgcaagaatgataaccatgcacaccaaacctactgaacaacttgtttcatttgaagtttctaaccactcactcgtctacgtcgcaattccaactctttcaaacactcacccagtaacatacacattaattattaccatattactaataatatatttatataatttgttttcacgggttaacagcaattaattatacctatatatagttagtgttaggagtgtcaaaatgttatagaaagatgaggatggagtgagttttgagaagacttttgatgttttatctgtttatggtgttggtgataactgcgtaagttattgagtttgtaaattattatagggggccgcgttcacacagatagagttcaccatttactggaagaagtttcaggcaggaaacgttaaacttttgctcccagacgacacttcgtccataatttttatcctaccagcaatcaccagtggcctttgcaaaggagatgtctcaattatctcttatactccctcagataaatgcgtagcctcttcttcatctaatggtaacttcagttttactttaattatactttaatagcattttagtcagattatacatatacatatagttgattgaaatgtatagaactttcgggatgtgttgctggatttggaaacggcatgccttcagaagtcggttggataacagcaaaggacaaattagcgggtgaatttttgaggcgagagttcccaaagatggttgagttgaggtactttcacttcttgcctcgaggagctctaagggcttctgaggtcagttttcgattttcggacggtagtgaagaggactttgccattactgacgagttgcggtacgagttcaggactcctgtgatggtgcagtgggcgagaattgagataaaggctgtagagcagcttgaaggtactgaaaacacaactggcggtgtttttacgctttttggggtaatttgtgagggcatacgtcctgtaaaggagaaacaaatagacacagttgacattgcattttgcagtggaaattgtgacccttcgaatgccttaatcatcgattcaggccacactaagtcatcgcacgggaatttgtactatggatggaataccaaagcaaatccaatccagtgtacagataacattgatactgctactgccaataataaagggtttaagttgaaagacaataaatggtcactggaagttccatatcatggagtttttagaataaaggtgaaattaggagcattgtgtaaagatttgaaggaagtttcactaacgataaacggatacgaagttctaggagtaagttttatctaaataatttggtttagtcggagaatctagaaaaaaattcaacagttacagtacgttcaaactacttacacattagatatatataactgagttataacacagctagatttcattattataaatgttcacgtttatttcattaaacgtacacaattatttcaatataataaatgaaaaaattatagtatgttggaataattaatatggaaaaagttggaaggatagagttgggcagtgaaactgagggtttgggattattaagttttaatttatcatcaactttaaatgaaatataacaattaaacaaaattttaatataacaatccatcgcaatattttattgcagtaaaattattcaatgtatgatattttaatttttgggaacagttcggatggcagatttagaagaatctgaggtggtaggggaaataaatcacccaggaattgagcttgacgctgattttaaggggattgtttttaggaactacattccgagggacgaaaacctcagaaaactttgcaaaagctcactcgaagattattcagcaattgaaaatactatcgatcaacaaatcgatcaaaccattctcaattatcaatctgaagtattttatagtctactttcttacatacttatatcaatataattctgtatacaataggattaagaactatataacattaacattccattaaactttactaccaactaattatacaataatgataacggtatatcaatgttgttttaggatatattgtcattagtaaggcccaggcgtcagaattgggatttaaagcgtgaattgaatcgcaagaggcaagttttatctagtagaactgacgctgcgattttaaggcttcttcgcgagcgcagagacgaagaacccttacaagtcaataatatcgaaaatcaaaccctaattcaccagtttcccgatatcgacaccgacgattctgaagatatggatatcgaataatttttcccacacctctaacacttttaattttattattttttattttttatttatatttatttttttcattaatgttttattttttaaattaaaatgatattatatccactatattacagtgttataactggattaatttaataaatgatgtaaattattgaataaattacaattattatgttgtttaaggtcaatggagtcaacacctttgcctaaacttcgtatagttccttcgtcggaccccggttttgattctaatcacttttcagttcctccacctttaaacacttctgcaaatccttactcatttccttccaactcaaatattccacaatattctcctgcaaatttctccaacccggctaatttgtcgcattctcgaccatttacatctgtaaatcgtagtatcagtaacgatgaagtagtgttatttgcagtacatcctcaaaccattgttaggcctttaaggcgtcgtgtttatcgtaggattggagaagttttggaggcctttttatccagtcttgagtctaaggggtttactaggggttcagttctggcccgtttaaaggcaactccatggtttcctcgcctatttgactatgatggcatcggttgtttgattaaaatctttcagaattatgtctgtcactcccacacacttgtggttccccttctatttaaggaggtttacgaggtttacgcccctgagatggatcgcacttgtgccagtcaagttctaagaattggaataaaccctgacactgataatagaaaggccttggtaatgggcgcaattgatttcactgaggaaaccatgtcaatttacagaaaccctcttgaccagaacatttcatttagtgtatcaagagttaacaaatcagttgacagatttaatagatcgaatgtaaggataacgcctgttaatgtagataaaacaccagcacaatttgaaaatgctacaaacaacacaatatcagacaatggtagtattattatagctattattatagtaaataatacttaaatttgtgaataagtttagaaaattttatagatagtggaacgataacgaatagggattttttcatcaatgagcagaacttgacgctgtttacgtctttcctgcccaggttgcgggaagttctgagggagagaacctcgaagttacaggaattggagaggaggttagagtctgaggagagagaggggcaggaacgacagcgacttttgctcaaaaatgcatacaaactagttcaccggagtgtagaagacgagttcaacacctttgagaagaatttgtcagttttagagaccgtttttgagacaaaatattcaaagtcaaaactggccaattccatggaagaattaaacaaaaacatgaccatattaaatacttatattaataattttttcacataatttttcatctattattctttaatttatatttaatttagttttatttaagagttaattatgactaaaataggatatcattaaaaattggattattgtgtatagccttccatggttatgtaattatatggtataatgcatacaatatggcgtgaattaagcgccttctgatatgttgttttattattccactattttaaaaattttctcactactatctttaattaaatattcaaattctttcatattaaatacacatttcttgttcaacaacctgtatcataataagctgtacaataatctaaatgacaatatttgtgataaaaatttgtataataatttgttcaatggcggaaaactgtttaattggtgcttatatgctacaaagagtaagttgaaggctgtaagaaagtttactcgtgatcgtcctaagaagaccacacctgccgctatatatccttctccaactttgtactatggaaatgttcacgaccactttggcgctcctccagagtatctcgcgattcctgtccaggatacattggatattctgagaaatgggaagctttcagagttgatttcacttttaaagtctggaattacaggttcagaactctcaaaagtcctctctgataattccttccacgcagaccttactaaagaactgaacaccatcaaagagatttctgagtttcaagtattacactattaattatatacaattatattcactattaactatacactattatatatatatatatattaataatattatttatagaatgatgatgtgagtaatgatttgtatttgtatttcgagcctatcataaataagcctgaggagtatgaacactacgtggacaagttttacacttttaaaaagctccagtcatactgggctgaacgtgaacagaaactatacaacacaattctaagacagttgttttctcggcttaggagcatagcttacaagttgaaagacacaggactttctttgactgagtttgcaaacccaactctatggcacaaatatggtgtttttaaacctgttccaaattgcaaaatggttgaaaattacctcacgaagcatcaaatcgcaatcaatttcgatatcaaaaacttgtactttagggacgagaataatgaaatcaaatcaaattttgaaaatttttattcaaaactatataaactagatgattctaacactactactgacactgaaagcagtaataatactcacactaataatacagatactaatattaacactgataataatagcactgtggaggatagttatagtttatatgatgacaaaggtgttgttgaaacagcctttagtattgatgagaatggaaaacttccttcggatttggttgatcgcatagtggatgatttaactgatttgggtgtacttaatcctaaagagccctggacaattaatctttccaggattgaagaactccaggagcaattcacttctgagaaatcccaacatgcatatgccattcgtgatttttatttatcactcaaatttccacattatcaaatcgaaactgatccctacattctaggtactacttaaacatttatacacatactatatcattactaccgtatcaactatactataacatctatagtataatattattagtgcatttaatttgtataaatcgaatattagaatcatacgtcaatcatcaatatcgcacaaaaacatatgaacgagatttgctggtcaagtataacaactggttgaaaagtggtgcacccagggagacatttaagcccatgaacgtgaagtataaacacatggccatctggcacagcctttcgaaaaatcagaggaggagactggttcaaaaatacgtcaaaactcaaactacccctgtaacccagcccacaaaataatttactaatacggatatactatactttatcatgtatttttatgctataccctatattatactatttgtgaatagtatagtgtacgattaaaattacaaaataagttcccacgggttgtaagacttttgctcctttttgttatcgttccattctacttgcacgcacttccaaacgtctaccgttgcatagtttgacctctttataactccagtctggcctgtatatttattcctacacttcagcgatgctctccacaaactcttcaaaccatcataaaccctaatattaattgttaatttgtaataaataattataaaatatagtgatttgacctgtatgataaatttataatgatataatgtagccaataataaaaacggtaagaataatggtaataacaacggtaataacaatgttagtggtaatgttaatggtaaacgaacctttgataagaatacataaaattgggcaaatgaaggtgttttggatatttgaggagtattgggagtgtgagattgaacacttgggatggtgaagctgaattaggtcttggggtgaatgttggttcttcagtgactttctttgtagctctcgttttttcaattcttgacattgttctacaaacgcgtctcaagtttttgactagtccgaacttctcatctagatcttcctcttcacgatcactatcctcatcgtaagccaagctctcaactgtcaaattcaaacaaaatatcttcatctgactaaaactatcagacaccttctcatcctttacttccttaactagatcactatcaccaactgcattactactatcattaactgtattcttcatagtagggggggaattggaaagatttgctggtagttgtagatcaattaaatttgtggttaatgacaaaattctaacttgacaagtttcctgaggtgcatttctataattatgttccagtttagccaataataactttatctgatcgatcagttcctcattatcatcggtcacactttcctcctttggtgtggcattttcttgattctcttcctttactgcattatttgtagtttctggtgtgacactattattaactggggacgtgtctgaaagaactgaatcagtctcttgattaacttcgttattggaacttgaatcaccatttggcgatttcgattttttagctctcttgggtttcggtgtcttttctaccttctcttctttaacattatttactgggttgacggttgtaacagtattatcggcagcagtgtaggtagtatgtgtattatcagctgtgtcagttttattatcagaggtattattattcaaattaatattaatatcagtgggagtattctctatagtagcatcagctgtgttagtattagtttccggaggggtttgagattttttggaagattttcttgaactggatttagtactgttatcatcttttgaaatattagtttgttctgcatcgtcaatatcatagagttggtataaatcattcgggtcagtgagactttcaatatctgtaagattaacatcggaatcagcatctctatcccttttctttcttttcttcttagtctttgaactcttactagtcttatttgtatgtttctcttcgtttactttaattcccaaagattcctgaatatcctttaacaaatcactaacggaaccgatcaactccagcaatcctcctgaaaagaacaccatcgtatcattcactttcagagagtttagcaactcaaatatatcgatcttatcaggttcactcagtgctgaattgagcaaatctccatgttcatccgcaaacttgttataattaactgctgtactaactgaaaaatctaaactagggtcgtagctatacacttcaaaaaacctaaaccacagcccggccttttcaaccatcatcatcaactcattgcccatattattatcttgagaatttggggaatttgcatagcagttgggtttatgttcaccctggggcttaactttctggtttaaaaatctccttaaatttgggctttctgtgttcaactgggtatatatagcttctagatttagtctccattcgtttctcatttctagccactttgtatgattataatatctgttagttacaaattcaaataaatatactaattccaatatctgtttcaaacactgtctacatccctctaaatcagacacgcagaatgccaaacacttctttatcatatgattcacatacaaattcaaatacaatccattattatatacttcatccattcttacttttattttttcattttgtgcagaactatttctaccactaccagcatcattaacagtagtagcactacttagaattgtggtggacagaacaattttagtgaatgaatttttgaaaaatctgtaaactcctctgaggagtggaagtaacatttctcctaagattgttggtgatttataggttaggatttcaaatgatggaagtgagaaatcgggttcaatttgcaagagtttgaatgccagatttcgttcatttgtggtatgttgcgacagtcttgttataaagcgtttaagggacttatgggagtcaattacacaccaacttagaacagctggtgcatttgccagatactctaaatactcctccactgtcccaaaatacgttggatgtctgtcaaacatctgacgactacgcctcacctttgggcgatttcttgtcctgcctttacttctcttcttcctcatcatctcctcctttacattctctccagtttctttatcacctgaatcactggtattggctgcgttaccattggcatcatcacggttagtcgtatcatttgatgcggtatctgacaccagcctatctggcgtatttattgatgaatcgttataagttgtatcattatccacattatcagctggattatcagtgttgttggagttattattgttagactttttattcgaaacattttctacaccattattatattaatagtatttagtataatgatatatactatagttaacattatgtagtaaatataataacatatctatggtaataaatatttttttaaaccttttgcatctagtgtcaatagattggtaatcttcgtttgtgtatttggtggattaggtttatttcgtttgggattattattattactattatcatcttgttgttgagttgatgactctcgtttccttcctcttttgcccttgatttgattgaaaatcctgtcctgtgtgaatttttgtgcaaattcagaaaggtcgaaggtaaagaatttggggttgattgagggttttctaaggtatttactcctccttatgattcgattttgtatgaatctgagttgaggcattgtttgtacatatattctcctctcatagtcaagtccaaagtaatagtacgaattgtaaaatctatcaagccctaacagaactggtctttggagatacctttcttccagttccatcaattctctgctgattacttttggtcttttaacgatctttttctcatcttcagttttcatcagctgggatttaagtaggaaaaactcttcgtttcgatcatctatgaagtttttgcccacattcgagtaactcaaaatagcgcccaaccataccaacaaactcagcctctcgtacatgtccaactgcaaaaatgtcttgtttctcagcttcaaaaaggctgccttaacgaatgatggtgcaattgatcccttgcaaagggtttcaaatcgttcctggtccgggtgccactccatctcaaactcataatatggacagtagcggttcaatccccagcctcttcttgtggaacgttctttatcctcttcttcttcttcctcctcctcttcatcttcctcttgatataatttattattgtccatttgtaaattatcatcttcaactccactattactattttcataatcttcaaatggcatatcgtccaacatattcaaattctcagtatcaatcatttcatcaaacttatcctcgcccatttcctttccaaatccttcaccaaattcaccaccaatatcactcactcgatccacgaagcctttgaaatcatctccatattgtttattgaattgagaatatgactgactgaagtttagaaaggaggggtccccccagacgaccgagtttagcttatagcggtaggtggttttggagctgtaaagtgcgtaaaacaaatataccttcaagaatgcattccatgtatattctgttaacatttcaggctctaatagcaactcagtttgagctatacttgaatgttctttgtatccaaacccaagtactggttccctatacaaatcctcggattcatctactaaatatccaatataataactcatgtcatatttcgtcagatccaaatcttcaaccaccaatccgctcttcctttgactatttacaaaagagtttaatccgttaataaagtgattaactgatttggtgagtgcgttatttgctttaaggtgttgtgggtgatcttttttccagacgtttactatctttttgaaggttggaagtggttctcctggcgtcataatggtcttaaaattagagtctgcaccgtacaaaaggtccaacggacagactttcggtctgctactgtcatacagtgtaaaactatctctatcttggtcgtgtgatatcacagtatacctagcaattaaattagtataatttttgaagtaaagtataattaagtattacctgtacgttgatgagaccgtaacaactctttgaaactttttgaatcttttattccaccttgacgagtttacgtagggtaacacagagtctgggtcttgtccaaccctcttaaacctacccttgtacaaacatcctccatttgtgtttacaaagtctagggcgagttcagagtctgaaattgcaacttgaagttctctttcctgaacttccttcttcttatcactcagctctccactttccctgaggttctgtacaaaccagtcgaagccgtaattacagatgtttcttctgaacacctgcatcagacctacgtacaatctgccaacacttccctcatccaaatcctccaaatattcaatatccacctcatctaaacattttttgtcatgttaaatatatagctaattatgactaaaatgagtaattagttacttatcagattcttgttgagataataaatccactgtaatccgtcatcatattcttcatcatccatcgcctcctccttatcatcttctaccacgccattattgacactattaacagcggcattcgcagggtttacattactaaaagtgttcatgaatcgcttattgttgcaaatacagatgggttcggttaaggggaatgagaagccctcgttgggtttatactctgcaaggctggtattgaagaccagattcgactctagttgtacgaatgtcattttcggtaaaagtggcggtgtagatagacttggtactgagaactgacgagtgaggtcgagtaaatcaacaatctcatcaattccataaaacttcaacgttcgcaatggaatatctctagggtaatatttcgcgttatttagtgcgatatcaacatcgtttgagagaaccggcggcgatttgtcagtgtcagatgcctctgaacatgtgttatagttcgaccattcgaagtcgaagggcagcaaaagcccgtcacacttggcttcgagttcaacagccttccggtactcttccctcttctgagactcggtttgaactacgtgcttgcggaccacgggttctatttcggaaactgctttgttcctgataactctgccgcttctgctcttcatatcattcatgttgtactgattattatactcctcgaggttgaagcgtttgttcttgggacccctcttcactgacttcatcaagccttgctgagcctgcaaatgcgctaaactgggtattggtgtccccttaacgtataactgtgacttgtagcggttcgcaagtgtgttttttcccaagtaatccaaccgcatgaagttgttatcaaagtagtggaatggtgattgttccctcaaacggtccaccaactcactcaaataagtctcgagtttccggctgttcgtgaagtagtaatagtacctgcactccgtgaagatgaagtccagattcctgtacacatcaataggcatacagcctaaaatgttaactggagctccccactgcgtcagatcctctttcttctcttcaaaagcgctgacttgtgagttttcagttttaccatttaattgagaagcaggggctaaattatctgttcctaaaatcatagttatagtgataaattattaattaaaataaccatatatggtatttaaatagtgtaatatgaacctgtatcttgagaatgtgagttgggttggttattggcaaaatgagtgccaacagtattcacaggagcatagttggataacgatcgtccataatttcttggaggcttagggttagtcattgacattagaacgttcttaaaggatttgtcattctctgattgcatttcctttacgattctggttgacatatcaaaaagtaattttgctggcgcgaacgcgttataataaccaccggagggtcggtcaattctatagaagacgtcgttttcagagactacccaaaggtatggtggagagtcctctttggtcccgacatcaaagaaccagtcgacgagcacaattttagctgcaaagtatctctgctttctggcaactttaatgaagccttctacaccgtcgattctacgtttggttttgaaggacttggtccaggggtggttagtctccaagaggtcctcaactgtgtgaacgagcccaatgtgcttgactttgcagaacataagaattctagattcgtatctgcccaggtgctccaaaggcacaaaacggtcaccccttgaggtgtacaaaacaaagtcaattacgtaccggacaactgatccgtcgccttgaaaccaggtataaaatcccggaattacagactccgggctgaagtcctggccaaacttctgcataactacgtcatttgggaccgattcacccgcattatttacgattacctgttcatcaggcaccaatggtagcccggaattcaggccgtccattgaacaatatgtcagattttcacttttgtttattatttcagaacattgatgcaattttttcctgatttcagacagctcattattacggattgttaacaaatcctttaaagtagcctcctttttttcgggattctgggtttcgtcctttaaattgctcatttcgttcttgggagcggcagatgtgctcaagtgccggtaatccatcagtccaaactattcgattacaaaccagacaaaataagaatgaggaatcatagatattttataagataaattaattatacaaaatttagaaaaaatagagaaaaattggggaatttacagagatgggaaatgcttattgcgatcatataatatacacagttttaaacgaaattgagaaataaatccatgaccgtttaaaatatgatatgaattcacaaaaacatgatttaatttaacattaattgcagaacataaaatgtgatattctaagcacaacaaaaagtaaaattaaagtgcctcaccatcttataaggtaatataaatcatcgattacaaaacattatttatttttctaatcgttccttccactatatccaaggcttctctagatgttacgttgtagttttcctttatccactgcctctcatttctcactcccctatccctttcaatccccctccagttatactctcctttgttattttttatctcgtttccagcagacattctactatctgtcaatattactactttactattactttgtcccctatttctaacttgtgggtcaccattactcctagacgaagtcgctttcatgaacatattccagaccttactggctatcgattcatcatctccatcagtatcatctgatacatcacaaatgtgagatagttttccttctattggtccttttttacaatttccttctgttattatgctatttggcgattcctgtctcgataaagtatttttctgttcgattacattgacttcaaatggattatcgaactccacacactttaacctttcggattccacataattcgtgcttttggaatcctgatttcctcttttcccttggttcataatttgccttttctcattttggtatattttttcggcgattgctatcgattctgagattgttaattgttggtcattttccttttccaagaatccacttatattagatagtggaaccacaatcctaaacaacactatatatacacactcgctacacatttttattctatatatttaattattagatgtattacttgttattttcgacgaagttttcttttccattacaataattttgattgtttgttgagaattgattggttaaattttggttaggtgtagaatcctctgagcttgtatctgagggccattggttttgtattggaattgctattgttggcttcacacctccaaatttcttactttcacaactccccaattttcctaattatgctcattctcctaattattaattatttatctaatctgctatttttaactggttacactatttttttacacatttactaataatttctttataattagttttcgttaggatattaatttatataattgaattacttgttacgcaaacggattgaggtgtttccaagtaaagttctggcttggagacgattagatcattgatgtgtaagacttcatttacgttttttattttactcagatcaatgtattcagtttcatcttgttctttgcttttacagcctaggcatttaaaaatccactttcctctgaaaaccatctgtataatctaactgatcacaggtgtttatttttactaatggtactttaggatcacacttgtacattttcctctctatccatcaaatatactacaatatacaccttaaaattacaaaatatagctcaaaaccatatttattacaataaaattaaaatttgtagatttaaattatgaaattaataacattcgtatgaaaaaatttctcatgtccaaaccatggatttgggatcttgtttttcaaggtacatttcatacaatgggctcaggtttctaagtttttcaactacttttgtgattgagtctagtgccatgtcaacttcagattctatggtgaatctacccattccgaatcttattgaagtgtgggctaattcttcgctaacatccaaactcctcaatacataacttggctcaagactagctgaagtacaggcagatcctatacattatttatattaattattactaaactatataacagaacgataaagcgttatgaaaaattacctgagctaagggcgaaattggagagtgacattaggagcgattcaccttcaatgaattcaaaggacatatttaagtttccaaaataccgttgacctggtttaatagatccattcactgacacatgatctatagaactaagtccattatacaacttgaagaacagattttccatatgacgatgatccctttccatctccattttggctattttagctgctgttccaagtcctacaactaaagctgttggcagcgttcctgatctaagtcctctttcctggccaccaccatctataattggctgaagcctgatcctaggcttagtcctaacaaacaaggctcctaccccctttggtccatagattttatgtcctgaaattgagagtaaatcaacctccaaattcttaaggtcaattggtaactttccaaaactctgagctgcatccgtgtgaaaaatcaccttgtgctctttgcaaacttttccaatttcggcgatgtcctggattactcctatctcgttatttacatgaattacgctacacaaaaacgtctctggtcttatattctttctcacctcctctggaagtatcattccgtacttatcaggctttagatatgttactgaataaccctcgttttccaattgacgacagcactgtaaaacacatttatgttcaatctgagtagtgatcacatggttcttcttcgatttacccggagattcaactagcctaccataaaacgacttagaacccttaattgccaaattgttactttccgtagctcctgatgtgaatatcacattcttactttcacagtttattaggtttgctatatctgcacgcgctgtttcaactgccttttctgcctcccagccatatgaatgtgttcttgagtgagggtttccgaaagcatgggttaaataaggcatcatagcatccaaaactctagggtcaacgcatgttgtagcttgattatccaaataaacacggttatatgttgttttcccgcaacctgttttaaactgaccttgaatatctattgaaattgagtagaaacgtgaactaaaataatttacagactttagcagtccgtttctatgtaaaaacttcattttttacacattattacttaattttaaaatcaataaactaaactgcaacattataatacaaataatttaaaaattcttcaatttattgtacagaataataattaaaattcattttaaataatcaaataaacattttctaacccatgtttcgacccatattattattactattaaactaattttcacatttagttttttaaacgaacttattaaataaacttccaaattttaatcgaaacaattgattaaatacattttaaagttaaaatttatgaaaattgacttttattttacacctttaatttattaccataccaacttgtttattgattattagttatgtatttgacaatttacctgcatatataaaatatatacaaaacaaaaatgacattattttgggttaaactaaattttaaggtatagttggtgacagtaatgttatagaagaatcaaatcattttgattctagacagttgaatttataccgattgaaaatgaaatttgtgttctaaaaattaaaagtttatctatttaataaatgtgtatacgatttagtcattctttttatcgtcgaagaagtcctcgtcatcgctatctagtgcttttcctgggtgtttaggttttggatttttgtttttaacgaagatcagcacaatgaggaggagcggcgatatcgctaggaggaattttactacgttgaagaggaatcttaggagatccgtcaacaacattatgcgagtggataaaagtttgattctgtaattttaaatacaccaaaatatgttaaaaaatctttagtggttatacaatatttggaacaatattatatacaacaaaaaataaattaatgtacattgtgtagtgacttgttatacacaacattggtttttcaaattaaattaaatttaggcgtttagacaaaaatactatcccacatggtattaaacttcggtggacgctttcttagattaatattaacgtactttgttcccgtagaagggtccttgtacatggtccaaaaacacccatcacagtcaactttcccaaacagctacaccatccttatattacctactaaataggtctatataactagctctaatgaaaataaattaagaaatcacttacagtcttctcgagtaggaccttttctaggtttataatggtaagagtggatgggagaaacttgatttcgtagtccttcttttttgtggattgatctgctgtgaagtatatttctatattacctaacgattgtctccacttaagctttaggcctgaaatctctaaaactttgaacgtttcagataataatcccttttctctgtaaattgagtgaaccgtttttttcatctcttctacatctaaacacttctttttaccttctgaaatttggttttccaaatcttcccagttaattttgctgttttctgaacttgggagatttgaaaggtcaaaaattttgttcatttccttttctaacttttcgttctttgtgttgagaacgtccttaaggtcaaaattagtttcatggtgatttttttcatagtccttttccaacttttcaagctctttcttactctctagtccataaactccagatttgatatcagccagatattcctataaataatttagactcgatattactaacatttatggtattcaagtcctcttccgttagcccagattcataatcctcgagctctttacctcctttactaaaagccgaaaacctcctttcaatattctttttattgttgtaaaaagtgctactatgtaaaaaacaaaaacaattcaacccaaagttattaattgactgtgaatgcctagttgtgtgtgcgatattaaaaaaatatataaaataaatcaatttcatttcttggaaaggttctccatttcgtccaatttccttgctgatctcagaacatctttgaaaacaagctcacttttacttggtctaactcttccgtatttattatatttatgttcaagttcagacaaacttgatttaccggttggcgaaaagcaaaaattagttctttttttaagtgggaagacaacatttacatccggatctccgtaatagcttctaaaatatgcagaatctccataaaatacaaacggttcgtgtgacacaggcctcgcttcacccaaaagtgatctcaactaaaacatattttgaggcataaaacttactttatcatcaataattttagggctaaacttttttataagtcctgcccaaaaaggtaaatatgttctatgcccagtttcccagtaaattgaatttatttgtaaaccgtgagataaatcttcattatttccagagccaggtccatcagacccatgatcatgactcatttactttattctgatatattcataaaatttaatttctctaatttttacaccttaaatgaaataatttaagcaatacaagtgatatggggaaatataccactttattgaccttattcatgggattctattcattaaaaccaacacactatgtttaaaaccatgttaaaaatttgtaaaattcttttttaggaaaatacagctaattgcagacccaaatccagattttaatgctaacacattttattgaacctagattctatgggaccttaatccctatttagcatttttaatggattaaaatgtaacatataatgtcttctggtggttttatcaaattcttatccaataatttgaatacctttgatgaaattgaaataacagaatctctcgttttatttttttttctagaaaatttgtaccataccatactccccaatttgaaggagttttccatagttgataactcaacttttgaatctttaacctccaattcaatatttgtaaattcaaattgtacttacacatcatgtatactattttctgaaggcaatttattgttaacaggactacagaaggagtttattaaggttttattaaactctaaattaccaagaaatgaggaagttctcgttttgtttgatttacttcggattttctactcaagtgaagatgggaaccattatatgctagtttcagaatctgtattatctgggataattaagaaattcagttctattttggaaaatgatgaattgaaatcctgctcaaaagatactcttgcactggctaaattcaagaaataccttaatctagttgggaccaagaggtttttgggtgaaataagtagactaaacgaacttagagggtctacgtataacttaattataatatctatatgtttcttcttacttcacataaacccatcttttagcggtgttactaaaaggatacctaaatacctaaacaagtgtaacaaaggtgacctgttcaactgtgccctaatagtcaacaatttaatcaggtggaacccaaaggattcggggctttgggaaataaagtcaatcttgactgaattttggtttagaaaatttaatataagaaggagtcgactgttggtttcaaagggtttgttttcgccaaaatccttagaatcaggaaatatactttacaaacttctcatgaaactcatttacaagttatttactgatcctttgcttttgttaaacaagtcatttatagaggagattttattcatcaaacccttcaataactgtgtttcaacttacttaagacatgaatataactctgtagttaacaatgtagttccaattttcacagaaagattggaaaagattaacattaattttgtatattataacaagtttagagagtttaaatacatggacgttaagacaaggtacacaatcaccctatctaactccattttcaagttgttttcaaggttttacattagattactgagaaactttagcttcccaaacatctttattcttttggtgaatttgatcaaggaaagaacttacgcaagattatcctctagtgtaatatgcttcaacgatttgttcatgagtagtttcctgtacacaagagtggatgaagattttgaaggtgttttaagattatgtgacgaaatgattaccaaggatgcagaaaacgtttggattgacaataaatcaaagctgttgtttaacttagttgatttcaaaacacttctcagaccgttttattttaatcatgatttggttaacttgattttcaaatttaggcttgttttgatccttaatgagtatttttcaacttggttcacctttacagatttgcttgatattttctgtgacactagtgttcttaacagatccgttaaaattaataaaaggggaaataaaagaaaaaagtctaagaccaagttggtggatcatgagattgatgagtataagtctgaatcaattcaaattagaaaggttataaatgaggaaggtttccagaatgagtttggccatatggatggatatgggtttggaaatgttagatacatttatctggactctaaaagaatatgtaagatgtttagtgacttacaaattgacttgattttaaactcttacaaccagcttttgtatattctttatcatctgtttcgtaatattagaaagttgaacaaaagcctgagctacgatttagaccttggaagcttcaagcttcttttcgaagctatattgttggcttccaagtattcaagatgtgttcctaatctcggtactaaagtcgacgttctggtaggagtcaacatgataaagaaaatgaataggttctataaattagtgttttttaagtatggaaaactattaagtgtaaatgaacatgtaccatattatttagattgtgctgtggccaaattggctctattgattctctctccacttttcaggttctacacacactgggtgatttcatctcaggcgaagcttgagcttctatatagacaagtattaaaattgaaataatattatgcgctcttcttgtactcgtatagtttagaagagcaaagtctagaaattttgtgaacttcaattaagtggtatgaacggcgttccaacttctcgcatagagaaatgtaaaccttctgtagatcaatttgtaaattataaatcttctcatataatagttttaacctcttgtaattggagtcaatagcctgcaaaagcgcagattggttactaccaataacaccgaaatgtttagtttggttcctagagtcgttaagttgaattttcaacttctcctcagtcaagtaccttgcctggttcttattaacaatctcgtccctgagttttgagattttggttaaagtgttatacaaatccttcctatataattcctcttgagacagcacagacgggcccttgccttgataattaggaggaaaatcctttaaatcgtaataaagaagacaaaagttgtcaaccatcggagggccggaatcataattaggtgacgactccatggaatcaatttaatctatattaaagaattaattaaaattaaggggaatccatattttaaatattaatgtcaaaatattataaataatctatgtcagtttttccacgtggtgtataactagtagtttgaaattatatatttatatatttttaatgattgtaaacagataacatgtataaaattatatttttgtaaacaaaatacagtttatttcaaaatttcccattaaaaatggctcatgaaataatatatgtactatagtaatgcaaatttgttttttaattcacattgtcctatacacccttctgtatcatattgttttcaatgtatttctcattcaaaaagttaatggaatccatcaaaataaaatttattacccatatttttttttaaatccagcaaattcacattttttaacaactaaacaacaatttaaagtaagagaaggttttacaaatatccacaaaactcatttaaacacaatgagaaatggaactgtttctcattctaaaccttccctgcagatcgcacctatgcttgatgtaacataccttcattttaggtattttatggattttaaatttgattttagacaattcatgagattacttactaggaaaacacaattatggactgagatgttcgttgcttcatctctaattaatgcttctaacgaatcggtatctcgatggttaagtaagttaaatatctgttgatgatttttagagtttgaggaaaatgagcacccaattgttgctcaactaggtattttttatcaacataaaattgttccaggagggaattgcccagaaacactagttgaagctggacggattcttaagaaattcggttatgatgaaataaatttaaatgcaggatgccctagtccaagagtttctgggaaaggtatatataaatttatgttaaaactgttcaatttaggatgttttggagcctcactcatgaaggaaaaggagcttgttcgagatattgcacatcacatgttgagggagctggagatgccagtgactgttaagacaagattaggagttgatgagtttgattcttacgagtttgttagggattttgtttcaactgtctccgagtccggttgcgaccacttcataatccattcgcgaaaggcctggctaaagggaataaatcctaagcaaaataggactatacctccactccagtatgaaaaggtataccgtttacaaagggattttcctcatcttaaatttaccattaatggaggatttaagacaatggagtccattttggaggcactaaactctgaaaatttggactccaataacaatcctcataaattaaacggagtgatgataggaaggctggcctacgagaatccatgcttactatctaatgttgacaaactcatctacggtgttgaaaatcccgacacgtgttacacccgaaggatacttttagaggtaatttaacagaaatttacgtctaattctcagaactatgcaaattacattgatgaaaatcaagttgatactgcgaatttgaatatatccctgattgttaagccgattttaggtgttttccacggagagcagggaaacaagatattcaggcgtaagttaaacacatttttgttatttaataatattttaactatagctgacaaatctactacagaatctctatcaaatgtttatgattatgatgattttatttatcattcgggtgaatcgcggcattcgatgttcattcacaaagttattgatcttatggataaaataaatcctgaagccttagataaaccgctttattaatatttaatctttttaaaagtaaaattatatttttattttttaaaaatttatttaatagtcaattttgttccactaagtagtgcaagattccagaagtttattttttgttttcttttgtaggccccaaattctaatatttgttaatataaaatttaaacatggattgggcgccaaggcagataaagccatcaatagagattgttgatttaaggaaggatcgcatggacttcatcctccttaactccgatgtcagtaccgccaatgcaatcagaagagttattctctcagaaataccatcattggcaatagaaattgttacagtgctggaaaacaccagtgttttacacgatgagtatatatcgcatagattagggcttctaccaattgatagtactctagcaagtgagtttgaattcagagataggtgtcaatgtacagataaatgtgcaaaatgtacagtagattacactctggatgtttcctgtaaagattctgactccagagtagttacgcattttgatattgtgcctgatgatacccacagtaaatcaatttacggcaaaaatttgccgatgccaatcccaagggctgatgttactaatttcaatggagcaacagatggaattcccatcgtaaagttaaaaagaggtcactcaatcaacatgaagttaactgcctccaaagggctaggaaagtttcacgcaaaatggatagtagctaacgttaactataagatggaaccaagattttcattcaattcatctttaatggagcaactttcatctgaagagaaagctggaattgcagcaagttgtccaaggaatgtttttaaatacacgggtgtaagatctgaggccccttcctttctaggtccctcggacaaaaccttcaagttagatgcagcaggtcttcacgtagttgacaaacttgcctgcatatactgtgacgagtgtatcaattattgcagggaactaggacacaaggatctcatacgcattcaaccagatgagtcaaaattccatttcaccatcgaatctactggagcaattcctcctgagaagatactcgaaattgccttagtcgttctagagaagaagttacaagatcttcaatctaactttacagaagcacagtcccgaaccttgggaacaacggcaactgctcagcatcgggaagggaccagagctccccaaccttccacaccttatatcgatttagattaattttttaactctctgacgtatgtattatagtttaatcttatgtagatttgttacttttcagtttattttcttatttaaataatgtacgataacattcccgttaatgggcttagtaacgcagtttttttgtgtattagaaacactccatatacaaaattaaacacaaactcttttcggagaaatttactttcaatagttgataattatataaattctgaaggcaccgatgttgattctgactcaaatcatacagattcaccggataaatttaataattacatcttaaatgctgaaaactactctgttcattttcttttatccacaaatttgagtgaaaattctgagctgtgctctttatacggcttcgaagatttcacaggtgtgttattcattctacttaaatttatataggagtatatgcactaagaaactttttaacagaagaacaatgcctgcttttggcatgtgaaacactcagatcctacattaatgttagtttactaaataataattatattttagccacctaacaatagtaatttgctagtcaaggaccctaacatatcttcccctatatggccgagcaaatcattccaaaatttaaggtggtcgactattggccatttatatgattgggggaaaaggcaatatgttggatttacacaatttccagagattgtagtcaaaattgttaatcaaatcaacactttactttctgacttttacaacccatttactgcagatgtactttattataatattaatatattacatttagtcggcaataataaatttctattcaaagagttactttctgagactacacagagacgatgccgaggaaacaaatgacccagtgataaatataagtctaggagctccagctattttttgtatttgtaaagaggatccgaagtaagtcaaatttgttaataatcaattcagccaacttcccctttcatgtgttgttgattctggatcgataataataatgtcaaaaaactcaagaagatgtttacatggtacttcaatatttaataaattagttaccattgcttataaaaacaaacaggtataagcaagttgcttcattatgtaaagccagattcaagtgatttaaacggaattgaaacgataaaagatacgaaaacaccgttttctaagccttatttcattaaaaacgttccaaagtgtccaagtgaagttttcaaagggttcacaacagctctagatgacgatcaaatatccagtgtaaaaaagtatttatcagaatcgaggatttcaataagtataaggaaagcaaaactttgaaaatacatctttttatcataaacagatcaatggagattctagaatctatataccttgtagggaatcactttccaagccatgattttgtaatgtacaactagtttatatagtccaaaatccatcgaattgtaatttaaataaattaatttatgatttttatttttattaaaatatttttaaaatttgttcccatttaaggctagggttatacacactgccttaagtcactcaatatattacatctagaataccatcttcaatatgtgattcctttaatttgatatgtatatttacttatcatttgcaagtaatattctgttatttttattgcttaaatgttttaattatatcaattgtttacactctagaattttaatggagcaacctttagccttccatagtatcgtaactaccaatataccttatatttccccaaacaatataactaaagataaatatatgaataaaagtgagaatttcatagtgaactcggaaccgccagatgatctatatgacgatttttcttccagcggagatgacgactcaaaatgtattttaacagggatagaagcacatgttcaattagcctctccatacaaggctttctgctcatgtagaagtattgcttcgcccctaacaaccctaaacgcgactaacaacccagatctgtataaaacactaccagctgataacagaaggaaagtttacaatggtttcaaagaggtattggaggagatttcatcaaattataagccctcaataagtgcttcaaaaacacattataaccctaccgctcctttgaacttcgaacagtatgctaagttttattatgagtcgacagaatttaaagactacggagatgtcgatgaaaagactcttaacgaaatgctctcgaaagaaaacgagtatacctgtccagtttgtaaaggtgaagtgggagccactccatacatatctccaatgtcatttttgtacgctgttggggtttgtaaagttttcaactgtaagatatctaataatgtatcctttgaccgcaagtgttacgaatactttgacttgccaaagggttatcaaattactcaaaccctgaacccactcggaagagatggcagcataaagttaagcaccggtaaggttgttactgtatcaaaagtccagtttgaagaggacactgccaggagagtggatgttcatgggaccacaaaaacccttgatttcaataggagcggagttgctctagctgaagtggtcaccgctccacttgagatgacgaggcttgaaatactggagacctgcagaaagatttacgaactggtctttctcaacggcctatcaaatggtaataggtttagaggaaacttcagatttgatataaatttatctcgtcctgatggaacgaaccgtgtggaggttaaaaatttgaattcctttgttactattaacaaggccatcaatgattacgatcctgaaaaggactacagttttaactttgagaactttaataacccgagtgttttaactaaattagtcagtgaagaacaaaaaaacccagaaaataagtctgagtcaatcttagaaaccatcaagaacgtgtttctatcgattttgaaacacattcccgatagtgacaaatacacccccatgggcacaacacttaagtggaacaaacacaaaggtttagagccaactagaagtaagcttccctcagattgttacggaaactactttgagcctaatattccagtaatataccagagtgatgacttgataaagagaatcacagactgtcttcctaaaagtgtcaagggcctccaatcacttttggaaaagtatccagaggtaaacaaggagcttttgaaggagatttacaagtatgcttcctggacagagtactatgagaagttgtgcacctatttagattcacgggtagctgcaagtcactttgtgaacctcttgttacccgtcgttaagttttctaataaacccttaatgtcgcctgaaaggttctcagaacttctaaaattagttttaaactacaagttaaacttgtcagatgttgaggtggagttaccacgcctattggattacacgggttcttttgaggactatttcaggtcaaggaaccttcttttgtatgatttggacaaaaccaagaaactcattgacgaataccttaaggagcatcctctcgactattcaatgtcaaagtatgtaattatctatacactattaagttactactgttactatagtttatacagttaaccactattaatacactattacactattaaacactagttacacacatatacattcaagcataataacataattaacacatcaattgattaatattaactttagaaatcctggatatgttgcaaggttgactacaaatcttgttcgttctctagactccaaggtgagctaccaatttgtaaaagaatgcattactaacatgctaaagaagtaaatttaatattattgagccatcttcatccttgtaaatcatcttatacttaccgcctacgtagtatactttataattccttttctccttattctcgccatcacccttttcactctccttaacctcctcgaaagttttcttcaaacaagtgtttccatcaactaagtctttcgattcatggtcttctattaatttccagaagcttaggtaactcgatagcatgttaaatataacctcaggtttgaaatctatctggttactagagaagaatccagcttttctgtactggataggcacaaaatatttgttaaaactaccgtagccggttctgattggaaaccatactctgtctggtttaaaatcgaaagttgtgccatggttacacagatgtgtcatgccagttaaattatcaaagtatgtgagaagcggtataacaaatctaaacttagaattcaggtaaacagctaaacttttcacgtgaatgggtaatttgatgcaggatgaaggcactgcattatttagaggaataggatcttgtagtttatatggcggagaattcgcattcaacagttccagtatcttaaacagtatattaaaccgttgtctaagagaaccacttatagttatgagtttaatttttgacctacttaaatcatttgacaggattttcttggttgaataattaaccacgggtctcactttagtaaaacagactaaatcaatttcggtactagaaccatcacaattaaaattagttggggcttgtttaggtacaaatatacatcctttatgtataacaagaggtctagttccaggatacagtctaaagcttaaatgaattggtagggaaatgtcctccagaaacaaattaatattcaagatttttttatcaggtaagtagagccactctcgcggttttatgttttcatacaatgaatttaagtcatatttattgataatttgattttggagagaatttcttaactctaacttcacatccttttgtgggactgtttttgtgattaaatctttaacgtcatatgtttctatcttttgattatccagttgtttgagaaactctttaccctcatccttgaattgttcttttccgtatgtgtggatttttatgagtgaagtttcatcaaagtcgtcatccagggtgtttatcttgttggaattataaaaatgcttcggattcacagcttcattagcgttgtttttatcttggtccttgtatgaaattgagaacgatccatatctgtgaaggtcaaaatctagtttcgtgaagagatgtaaataggctatgaatttggggtaaatttctttactaattagttttttgtctttaaatagatcaagttcgaaaaaattaaatcttcctgtacaaaaacttgggtatttattgtattttggataatcttcagctgtgatttcatcctcaaccaatgttgttgtagcgttttcttgatcacaatctgtagaatccagcaaaaaagccttttttttacaacttccatttgagtagatgtgaaaatgtgtaagttctgttttgatattctgcggtctgaatgccaaggtccaatttgtttgatttagtgttacaattaggtaaaaaagacaaatacttaaaataaattttacacattttatgatatacatatattttacacttaaaacaaaagatctgttatgggaaggttagtttgaaggtttgggcaattttacgtttaccatacaatttgttttagagatcaaaaattgaattaatatttaaatataaatctaacaccttaattttgattctatatacttaattttttcctcatctccaacctaaaatgacgtttattatggtgaaaaaacttacacattttgaccattcgaagtaggggatgtgtaccaatttagttccaaaattttgaataatgtaattttttgctttagatgatgaaaccatttcagtagtcccagagtaatagtgatatggaccatcgatttctataaattttctctcttttccacttccagttacgacatcaatgtaataggatccatttccccagggtacttctgattgaattgggctatatttctttctcaacagtgttaaaacacttctatggaatcctaaaaaccgctttaaataaatatattagtacctgacataggattcaactgagttatgttcatgacttccttttcaattaattctttgtcatttgaaaattgtttccttcccgttttcagatgtttattctggcctaaaattgctcttctcatctttttaacataaatcttaaaaactcttgacttgaaatagtttctttttatcatcaaatggagcatcatcgtcactattctaagttgtgaaaagagttccttatttccatcagattcaagttcaacaagagtatcaaattgagctacacaatcaataattggtgaagcgtctttattttcaactgagtttgttctacatatcccagtttctttgtgtaacattttaatcgacaattcaatcaatttcaaaacagttaatctactgaacttgtcaaatcccacaagcgacaaactatataggcagtttgttgccatttgcaaattaattttataaaaatcacacgaaaaaactagtttagaaatggagttaaacatctgattttgaatatcatgtttgtccatgtttctcagatgtttatacaaactattgtttctaatatcaaaaatacgatttttgggtagacctagtttagagaaactgttaattatgttgaaaagcgaaacatagttaatcgtttcaaaattcctatcattcaaaattctatcattgtggatttttattaatttggaaaagttttccatcaattccggattctttattctgtacctaaatattaatttaataataatttacaaaaataatacttctaacttgctcagggagtgcactattgctgatatagtttcaatgtgaagtggttttaactccaaatggtgcgaataagttttgaaaaaccttttaatgtaatcggctgaaagaaccacaaatttgacaaaatctttgcattgtttaaaatttcccatcgtgtttaacattgttgccaataagttgaggttatcggttgtgtattcagatatatccttagtcagttccctccaatcattattaatatcctctgatggtgcatctaataaccctttagattccaattttaaaatattatataggtctggtggtcttgatttcgtctttacaagtcctaatgtgttcggatataacacataatctaatcgtttcgagtattgtcttaatgctgtaactacatgttcatgaattagttgatttaggttattggacttggagttgttatatatcaatactaaacttgttagaaattcagaaatattctgttgtgttcctgttaatcccactgatttcaaattatcgttacacaggagaatcattgaggctggcatacatcctagaattgatgagttatacaacaattgtattactatgggtgcatccagttccctttcactaaccaagttatatgtcgattcagtaaagaatgtgttaaatttctccttaatattttcaatttcctcttgtttgaatgttttggagttgaatatattaacaaatgttgacgaaagattaaccattaattcagggtcaaaacttgatcccgagagtttgtccacaattttgtttgttaaagtttggagtgtgttcttagtatcgtaaaaatccggaacagtgttcctatttttaactatagaattaaatatcatgcatgtatcacgggaggggatataatcgacttctctttgtaggtattccaatccaatattgtacaattcaattgttccatctcctaatttgaccagtgagttaactgctattgcaaatgatttagacgtaagttctccaactagtggtgtgtatttatcttcttttttacaaacaattttatacatttttttgaatatataagagtatttggggagtattcctttaatttgaaaattgctccaggagtatacatatagtataccggctaagtcttcgaatgtgaacttatcatcctttgtataactttccaagatactaaaatgttctgacccgtcctttgagctatgccactcgtcaagaagtttgttatagtagtgcaatttgatttcagagactttaaataggagtctaaatagtgtttcatttttataaccggacactgaacatgctgataatattgtgtatatgttgaagggtgtaaattcgcatcttttatcatcctcaaaaaacttcacagggttcattttatatgtatttatgtaatttttacacttgattacaagtctttctgacatttgttcataaaagtcagtgttactcattcttgatttcgccactgatatcatcaatattgatatgtttttaacactgaatttatccaccaattctattgcccttgcgatatatttctcccaaacactctaaaattaataatttttattatttatataattaccttttttaaaaatcctgatttacttgatctcatcatcgccatagtgagactatgggtctccattaagttgatttcatctgttttacgttgataatcaagcaaattcttgggaactggagttaatacatcggttttagactcccgtttagtgacgaccagatgtgtgtttgtaaatggcctagtttggccattagttttaaaaattttaggtataattaaacaacttctattgtaaaatatttttcttaatggaagattggatgtgaatccatgtatgtatagaaaaggcattttgtacactcatattacaatcaactacatttgacgaaagtttattataaagaaacaattaaatataaaataaacactaatgtacaatcaatattatttattaaagagcctgctcaatcagtttaatttgtgctggtgttaattttttagggaacacgacattgatagtcacatataagtttccaaatttatccgaaccgtaaactggcataccttttccttgaatttttatgacgtgattatgcggtgtaactccattttgtgagaccgttattgatgtttggccaaaaatatcgatttctcgttcgaacttggtaagtgattcttttagcgatatatcaactttgcagtgtagatcatttccttctcttctaaatctaaaagaatttcattagatttataaatttaatgtttaaaaattacacataattgctaaaatcacttacacatcatgtggtttttctgtaaccacaaacactaaatctcctctcttcattcccggtttttcttgtcctcttccctccattacgatattttgtttattcttatgacctggctcgacattaaccgttacttgtacttcttccgtatataccggtccgtttgggcattcctaaatactataatgatttttcttaaataccttgcaattggggagccatccttttcctctaccaatacatgaatcatctctcatttgatgttgaatgaacattccataacctctttgttgagttactacttttagacctgggccgtgacaatctgaacgcttcgtttcgcattcatcataatttttgcacagtctagataattctagggttagttcgaattcttttcccgtgtataaaaaatctaatggtactgacaatggataaactagtggttctgccttcttttctttgggtccttggaatcctgatgaaaaaaagttggaaaatatgtcgtccatgtcatattcttctggcattcctcccatcctctccattctgtcaagtcctgcaaatccatggttatcataagcttctctcttatcgttattactcaatatttcataggcttcatttatttctttgaatttatctgaagcgtctgggtctgtgctcagatccgggtggtactttttacttagtccaaggaatgccttccttatttctttatgtgtagatgttttactcacaccaagtacttcgtatggacaccttttatcatcgtgggtttcttcctgaggggcttgaaagtcaaaaaaatcgttattgaacgtgaaatgaaaggattgtgcatattttattgattggagggggtagtaaaacagaattgataccaataatccaaatttatacgataccattgaggaattacaaaattacatttatatttttaaaaaaatctataaataatggaattggaaaaacaacaccgacacatgaatcttaagaataaaattgagtacataaaataaaaaagataacaaacgtacaattgagaaaagaataatagggtctaaaaagtcataaaaaataaagtatgagaggtattaatgtttccgttgtttacaaaactaaatagtaactcatttgattcaaatttatattacagatacagccatacaccgaccatagaaccaaattaataagtaaatttataaattaaacaatataattgttaagtcatttgatttttgtgcgcttcttccccactatggaatactctttacacattaagacataaaaatgaagttacatggattcaaactgatccttccattatctgttacttttatattgagataataattcgaattttgtacaaaatggactccctactgttaatccatgtctgaattgttacattcggttgaatattattccttttcctatattccaggaagacgaatatgtaagttacatctctaatattttaaaatctatattttttacactaccatttcccctcatttttttacattttaactcgtttaagctagctttaccacaacatacacatcttatatttaggttccaaccagatgatttatcgagtttttgaaattattttttacaaatgcctgtaaaatgtctaaagttaattttgaattgtcgattccttcggctttagataaaaaactaaaagaaattattgatccgagtgaatttggctctagaggatttgttttacgttcttatagggggaaaattttcaacgttaagcatcatggaaagaagatcatcggggataaggagctgtatgaccatatgtcaaccaactttacttggcttatggattacttgaaaaatgaaaacccatatgaaaaaaactcaaatcagtttgaatctaaaatcagccacctacttggtgtgacaaaagattatttatctgactccattctcatcgaaagcgagccccctgacttagttttggactttcctcccgatgctaaaactcagcaagaggatgatcaaactttcgtcaaaactgacacatttagttcgcctaataacatagatgggaaagttaacacatataaacttaatggttcatcacctgattattctggagttttaaagtttgatttatcatcgttaatggggaacctaaacacgttcgacaatttgaagtaagttctaatgactggaatgacttcaaatttaggaaaatactcgaacctgttccgaatgcacctgatattacagatacactattatatcagtacatgaaacccaggagtggcccatttgtggacacatctgaagtagaaagggtaatgtttagttatcccattgatttgaaaatggcaaatttacttagaacaggtaatttgaaacagttaaatattttatagctttcgaaaagtcgagtttggaagcatacatcaagttggtaaatcaattttcatccaggtgtttcaaggtacttgattacttatgaaaattttagattaatagagaatacgttaaacctatgacattttggaagacttggatacttaatgggtttcatttaattttttatggaaatgggtcaaatagtaacttgttaaatgcgttttctaagatcgccttgaggtttgttaattccaaacatatgtggttcagtgattcaccaaacattaccataaacgcatatgccatcaagggttccgactcctatctctggaattatcttagtgacaagattctggatacgaaaacagtttcaaagtctgaaggtttaaaggtatttacgacaatcaaccaaaatttgttttagagaatttcaagaaaggttgagtcatttaattcttatttttatataattatacacggaattgaccttttcttgttgaatgacggattcaataccttgaaggatctgatagcccttaaaaatgtattcaaagtttttagtattattttctaggttaaagtgataggatcaatgaatcaccagaattcaggaccaatttttaacgattttgatagagtattggggaaatataggattgttcacaccaacacatttcacgaatttgggttcgtttgtttctattagtgtttcttagacaagaactcatttccatatggcaaaacacaccgcctaatttctttatgaacaagaaagtacagaagagcgcagctcaaatacagactatactggaggctcttagcaagaatcaccagaaactgttctcacttatcgcacaaatacaactagagtttgtttatattatgatcacacacttttagaaccactagagataccaagaagtttattggaattgagaagaattccatacttcatgattctagggccattactatttgccataatgaaactaaattggacaaccttctgaccgaattcactacacatgatgtatatatattttttcattttatattttcaggtgattgaacaaactcgtgggcctggaggcagattatttcttaggattccatttgaaaagtatgttagctcctgacattttttttcagtgaacagctcgatcgctttattatttagtttttaatgtttacaccccatttcttttgatcttataaacaagtttataatctttgctgttttgaattttttccttttttctttcatttttaatatcctttaatataaatttattttctgttgttctaacagaccggtgatagctcagttggtagagcggcagactgtagaaacgcggctatctgttggtcggtggttcgattccgcctcaccggatttaattatattctatttatataattatattaacatattagattataaaaaacaagaattttgattgatttgcttgatttagtaagatatttaccaaattatcctttgatgtggtaaagaattgaaaaataaggttacaaaaaccaatgaatgaaaaaacaaaaatattacagattataatttaataaatttctatgatatttcatttattggcctctttttagatttgtttgataaaacatagtcggggagttggttatttttgaggtgtttgatattaaaactgatttgatccctgtacttttccatatcactccaattatttataatatctttaaacgattgcacagacgagcgtatatcgagagtttttgaggtttctaccacacccgatatgaccttgaaggcgaagaaagcagaagatgcgtaatcccaattatcatcctaaaaatcgttgaaaaaattaaaaaatacttcaaatttgaaaaatcccggaattggtcttatatatgtgtttcctaggttctccaatctgcttatgaggaatctcatcctacttccaatccacccttcccacttattatgggcctgaaaactttaaaataggttaaaaactacatgttcattagatccgtagacttctattactagaaagtgcttgtagttagaaaacacatcctcctcctcaagaaccttctcccataattcgacgtttgtaagatttgacgttttaaatatttccaaagccctcataagctcctctgttatcactctctttgttgttgcagttacattatgagtggaattcatagagggaaaggcaggtgtaattattggcatcagatgatgtcggtcctaagtacttttaattcattaaatacgtacctgagggttaactcttggatcccatactttgaaggacattaatcctgggatatttggtggctcctttattttacataaggtcactgggcactcccactgccatactgagtataccctgaaaaatttttcaatgagttggttgggagcgcagttggggtacaattgacagactcttgctgttaaaattgcccacgccacgccacctagatatcctacaactgttgaatatattttacgtcttgaggcccagagttttatgaacctgagtgtcgttctgaagtaatttttgtttggtacagagtcgagtatataacttgctactctacatccattaatgctacgaaccgtcgagtcattcatgttacgtaaaatgttatcatccaaaacgtttatatgtggactaacagttggagcatctaagttggcaaacagaatgtcgatgctaatgtcgtaaaaatataactttattactggtgtgtacgcatctggtacagcttgcaacttagatataccgtctactttatttaatgtattgtaaaaatcagaaaagaacgattcacgcgttacgcttctagggcacagacacaaaacgtctatatcgctatctggagccacaattcccagcctatatgatccaaaagtcaacagtttacctgaaacctgactcgcttcttggtctgttaggcctctagtaattttagcttgccttctaacaaactgttgtaggaggcggttaagtgattccagaatatcttctcttctttttttaccttcttcagtttcatacaaattatgtgattttaggaggttaagaagttcgcgggaagccttgagatcgttgtttgttggaccttcatgtgacacaggatcagttattccatactgatttaattggatagattgtacagaaattaccattgtataatcttctgcttaaaaacattaatttgaatatggattcaaatatttatcggtgattaaaattaaaaacatcatttttatgacatagctatattacataaaataaaaaaagcctaaatataatattctccttacttaaagagaatatataaaataaaaattatataatacaaaaagaataaataattgccaataactgttgtttattctagccattgtcaggttgtgtatcattgacattaatctatatacattttatactggtacaccttcacaattttatttgaaaatgtaattaaaaaaatttttggagatttttggtttattttatcatttataaaatctaacgtttgtctgattttctggcattattttttattttaactgactttttttaaattttaacgcacacatatttttaaattcaccttaacatttcacatacactcatttcttatcgatatttttcaattaaggcccatgatgttactatcttaatgatgattgcatcattcttcacattcctattctattctctttaatttttctatactcaaaattatgattaaaccaaacaagaactcaaattcaggggaaagtaaatttggcttatctgttctggatactttgttaaatcgcgatatttatgacgtttcaataaatgaaacaacatctgaaataaggggattttattcagactccgacaacaattcacatcttgtatcatcatcttcgtcacacattttatcagaaaatggaatccctaatagcaccttggaatcgcctctgtttacggaaactaaaactccgactaacagatcggagcaacttcccattcttttggccagaaactattacacagcgccaccttgtttgttaagatttgtaaactcaacctctaccattagatcctataaagaaaacaaaagggattcagatgggactgtattggacaatgagtatgatcccatcattgattgcaacgtcgacaccaacgatgaaatggatgactatgatttaaatgaaaacgacgttgaaactttctctattggtaccatgactaatagaacttctctgatgagtgatcagcagtttcctgactctgatgagcttgcttacatgaatatggaccctctggagttaaacttagttttacaaaatgcatcttcaaaacgagaccctcattttgacaagggttgttcaccttttgttattgaaaagtctacggattcaaataccaactctaaagttacagttgatatcggaaccagccctcttattatggatgagactgaattatttgacaaatgggtttcaacagacaaactagatgaagacacggaagtaaaagtagaagacattgaaataaaactagagcccactactatggattcttaccctccagaacttgaatcaaacgatttaaacacaactgacgttgatgttgaaccttctgagttcccgataaatgatgatgctccagactctaaggagtattctacacttgagtctggtgatttttcgataaaaaatcaggaattacctcaagagaatcaaattcccgtttattgcaggagtcttctctacagaattagagttcctctttcaaagcgccttaaaaacataaacgaggatgctctaaacaatagtttgagttctccactcaattcccctacaaaagttaacttgagttgtgatcgtctattttcatctaaaaccaaatctcctaattcaatcgactactcatattcacttttaagtgttagagatttagagcccaatcgttccgactcctcaaatttattaccgaatacaaactatgatttttcaaaaaataaggggaccaagtctaataaaattaagagaaacttgactagttccctaggttctcagggccgtaacaagattaggaaacggtccagacctttaaaacgataatattatactatgtatttgtttattttagttagattatgatgctagaattggtttgtgagtattaaagtacggtcttaagacccactcagtttcaaggtcacgcatgtctactgttccgagttctattttaaatggttttagtacaaatcttggccctatttccttcaaggcgacctttttatcttcagctccgatctttttttctgtccaaacatggtggcgaaatataattttgtccttttcgttaataaacgacattattctcgtctcgtttgtgtttggaggagggaacatgtaccttatgatgtccttgatcctctcaccaagtgggcttgtaaagttatggaacattagatgcgggtaagcctaggtaataaattaagtattttaaacatacttgggacatggttggcagtttttcagtgaggtcgtgtctcagaactacatctgagagttgaaaatacgctgttggaccatgtggaaggtgagttatgatcattgagttggggttacctataaaaaactattttaattttgtaaatacctctcgtttcataaatcagaaccatgtctgagacatctttagatctgcaaaattccaccaaatcttttaaaatatatgaacccctattcaagcgttctgaatttgggattattaagcacaactccttagcaaattgcgtaagtctactggatggattccttgaggtggttataagaattttcgggtccttaaatcctaaattttttgtaaaataatgtaacataccacaaaaagcatattcattgtccacatgagagtattcttctcttcttttggcatcaagtaggtccaatgaagcctgaacaactccactttggtttcttaactctgtaggaattggtttattattttttaaagcttcatttagctctctagctttctttaaggagtatttatctttattttctcttgatttgaggaatatatactctcttctctgtcttagggtcttacgtagcattttaaaatatatttaaataatacatactatgatacaattaattaaaaatttgaatagactgtgaattactatattatggctccagttacaaatggggaattcaatctttggttttaagagatataaacaattaaaatacacaaaactccattgaacaattttaattattaatttacatttgcatcattttggtttaattgtataaacttgacaacacactaattttacaggaattttgtttgaatagacgattcgattaactattatccgacactagtggacaaacagggcattcgtctttaaattcacacattttacacttccatgcttcatttttctacaacacatattagttaatatagaatacttacagcaacatagtctgcctccctcaatccatcccagaagttgcaaagatatcctactgtcatcacggcgttgtctctattcaaatttattttagaatttgagaatatttctccctcaaattcgtactccaggttcatttcgcatgaaattttgggtagttttttgaatgcccttaagtatttcttttccagttcatggaggcatttttctttcttcaattcaggagtggtaaattctgcaaacttatcacaattgaaagagtcgtataatttttcgaaattcaccactccattctttgtatcttccaacatcatacagtaaacctataaaagtattattttagtaataaattacctggacttgaagtgatgctccttgaacttgttgaactgatggtagctttttactctttctggttttagtgtcagatattattactgatttctgctttgtgagcctatctttagatattgtaagttgatcgatgattccacagaaagtataactgcctaagttccagaacagccacagttccctgcatttaccttcagacatgagttgctctaacagattaatggtgtttaacattcttattcccaagttgtcctcgttagtttcaacttccacttctataatttcatggtcttccagttccagttcttcatgccgttcaattccttttagcatctcttctgtaacccttttacgacccgtcaacaatgataactcaagttgtttttcgcaccaaagttgtgaggacagttcagtcactgatagggtccaattcttgttaaacttcaaaactgggggcagagagccgttttgtgtgttttgagactgaatagaatctttgaggtagtcttctatatcatcaatcaaatgatcaaactccaagggattatcattttcagttaattttgaagaatcatcaccagatttttctgttttgttataaacaattttaaatttccttttcttcttgtcatctttgacaacgcctgtcattttagatcattaattaagtttatcttcgtttaatgacaagagtaacacataaaatacatcgagatattgtaaatgattaaacaattatatgtacatggttaaaaactaagttttttaattttatatgttctaaatatccacacacatcttctttataaacgtcgttgacagcggatggggaaaatatgatatttttttaaaaaacattattaattaggttaaaattacaagaatctaaatatttttacattatatttttaaaatataattcatggattctattttactttaggtttttaaggattcactttacacattagtcattggagtaatttttaatggaaggagaaaatcccctgaaatgcttcagaatacaccgttttggtaacatttctaaatctgatgaagttattttgggtaatttattgtatcatcaattatcactattaggaatcgacgaggctggaagaggccctgttttaggtccaatggtttatggaggatttttttgcataaagggagatgattgtaaatctatactcaaaaataagataagagttgatggtttgtttaaatgtgttttaaattcctgtaccagattctaaaaaactaactgagactatgagggagaacaaattttaccagctgaatgatcctaattatccctttggagttgttgctgaggtgataactcctcagtatattagctataaaatgcttcaaaggtattttttctaatttattaattaattagggataaatataatttgaacgagatatctcacgacaccgcaatttccattattcgtcatgttttagatcatggttataatctaaaagaagtaaatttttattggattatgagaattaactcaggtctacatagatgcagttggtacagtaaacaaatacgaagccaagctctccaagttgtttccaaaaatacacttctctgtatatttatttgctaattaatgaatggttaggtaagggagaaggccgattctatttaccctacagtcagtgcagcttcaattgttgcgaaagtaataagggataacataataaaaaattggaaatttgattttgaagtagaaaatatagggtctggataccctggtggttagtttaacattttattaaaaagattcagacccttacactaaagactttctgacaaataacatggacaaaatctttggattccctgatattgttcgttacagctggtccactgctagtcatttattgaatgggcctgacggtgttgaggtcgaatggtatgacgaggagattgttcactctaaaaagaacgatttgcctagtcctctctgttatactattaaaaatgtaacaaaattttaattaaaatattatattctggtttatatccaaaacaggaatctttcagccttgttattattatcagtattcatgtcaaccaggtgatcatttggaatgtcttttggcctagagctacatattcttgttgttgcgatatcttcattttcctcgttgtcataactcgttcctacaaaggacgttagttccgtagagttgtaagagttgaaattgcaggtctctcccctccttggtctgagttcagcgcataccacttgagttttgcctgagaacttaaggttggataaaatattaacctgctggtgcctcattagtgtcacatggaacttgttttttactgacgtgtcgtattcatagctttcttcttcatcactctcgctttccttttttaccgtttcagtttcagtttcctgttcttgagtttctggctcattaacttcagatacaaggttttcttcataatgagtatctttttcagagttttcagaagtcgttttcatgtaattggggtctaccagcggaacgtctgtaaatgttatttcaacggctcctccacgtgataggtaaatccctttaggagctagttgggattcagttaggttagatattctgttagacttgttaatttttcttcttttcggtttgttcatgaatgtattaactgttttgttgagggtgttttggaattcacttgctatatcagttaatgcttcactcataacgacatttgtaaaaagtacacttcttttggctaactttcctttgtattttataaaatcaagtccttctaggtctacgttatactgactatgataattttgcgattgctgtttaagtacggacgtaattgttagggaggtgatttgaaatgctcgtacgactttatatatatctgaatcagttacaaggttgacaagggccaaggtaatatgaggtcgtttctcaaatgtaacattaccacctaaaactggataaatagattaaaaagaacctaatttattctttactaatttttggaattctgagaaactcttatgaaactgatctcctctgactgggaaacacaaatagaagttatatacattactcttcctgcaaatatctatgatctcgtttattgatggttctgccttttcgccggatgagattaatttcaagtcaccgtctacatcctgtaaggacattcgcacctcaaataacttctctatatcaggaatcttcttttctataagggttttaaatggagttctaacattaactgagtgttgattttgggaaaataaggaatctggcggtttgtaaggaagagattcaggttgagattctataaaatgtatatatttacttaattaaattcaaaccctgatttaagtctaaattccccagtggaataggaatcctaaatgttacatttggattcttattaaaattttctacttgtactgtttttgtgtcgaacttaaattctccacgggcaaaatcattcatagatctgaatattttatcaatttacataagaaatacaaatagaagaagcgataattaggtcaaaaagttaactccgtaatagtacattattttacagccctatgccattccggtcaatatgtgtactactttatgtggcacaaattatttaattaaagtattataattttactaaaatttactattaacttaaagcgcataattaaaggtaaataaatcaaatatctcttatatattcagcttgatttagtatacttcagaatacgatcttccatagattttatatttaccaaaacattttgttactctatcactattttaaacaagctaaccagataaaaaaagagtcataaaaaatattaaatgattctgatatatttctatgtaatcaactatatcttgtttaggttcacaaaagatttaccaataataaatacaatcacatcaaaatgtcatcagttagcacactaattagggaggctgttgaaatttacaggggagactcagccgttcctacatcgttggcatcagatccagaggttagactacaacaaatcgtggatcagttgacggtttcgctaaatgatttaaaggatgtttcacacaacttttattctgagttgatgcatggtttgaaagctcacaggaggcacagaaacttatggcttccaaatgagtgttcattcaaaatgttggactcctttattcctaatattcctactggcaaggagaagggttcatattttgctttggatttcggaggttcaaatttcagggctgtacggattatgattgaaggtgatgggaagatggagcgtaatcaatctactttcagtttacgttattccagtgcacttggaccaaagggtcttcttgatcagaaggctacagcaactgaactttttgaccattttgcgaagaagattgaacatgtgatgaaggaatcaggtgttgatcctaacccatctaaaccacacaaggttggatttacattctcatttccttgcactatgttatcaccatgtaatgccattcttttggattggactaaggatttcgagactggcagggctacaaatgatcaggttgaaggaaaggatgttgcaatattgatgaatcaagcattcaagagaaataatatgaatgccgaggtttcaattgttttgaatgacaccgtgggaacgttgttatcgtgtgcttatcagaaacccaaggattatcctccatgtagagttggtgtaattttgggaaccggttttaatatttgttatgaggaggatgaatatgaaaggtttggatatgttggaagagttatcaacattgaatgcggaaattttgataatgaattaccccaaacgccagtagattacgaaattgacttttatacttccaatcgcggtcgtggtaagcttgagaagctggttgctggagcatatcttggggagatcattaggaggttcatgattctatacctcagagaacaagcccctccaaagatgtgggaaataggtacattcacttccgttgacgccagtgagattctgaacgacaactcagaggatttggttatatcaaaacaggttgccaagagatcatgggatgtggaattaccaaaggagtccttgatagctctcaggaagatctctgaggctgctttcggaaggtctgctggatttgcagcagcttccatttgtgctacagccaggaaggctaaggcgtatgtcacatctaaaacaactgttgccattgatggatcactttatgttaaaaatgaatggtataggaataaattgcagtactatattgacaatgtaacaagaccggatcttgttggaaatgtagttttactatcatccgatgatggttcaggaaaaggagcagcaatagctgcggcaatgtttgattaatattaattttacctgacaccctataatttgtattacacttgtacttattttaattaatttttattatgccccgcggaggccataaaggccttttatttccaactagcggtgttaacttaaatttttttggaaggagaagaaggcgtggtttataccatcattgtacaaatgaaatattcaggcctagttggggacctattaaacaaccgactatttcacattatttaaatttattaaaatggaaaaatggtactatttctgaatctgaaatgcttccacctcaaaatgtgtatggcaaagatgtccgttcagcatggcccgtaccacgtaatttttcgaaaaaaaaattaattttattttagcaaatgaatttatctctagaatgtatgataaaaatgaattgcgctatttcaagccagtgttaatgtccaattctgacagaattcgtaattatatatataatgtactagattccacaaactcaagatacaatgggtttattggactaaatcaaaacccagaacatacaatttcatcacaacacatatcaaaaatagtaaatctcgaaaacgattcatcattgccaaaaatcaacttgcatattgcaagatgtgagagaaggtgtgttttcacattttaaaatttccttaggttcaaaaggctagaacacttgattaaagaatctgattcatggaggactatcactcaccatcaccagtcatctaccaatccatttccgcacgtgaatgaaggcgcctcactaattaggaatttaccaatatctgaagttttatatacaaagggaaaccataggctaggtagaagagcacatccgaaatggtatactgcaaggtaccggaaatttatgaaaaagagggaacttaacgaaaaattaagtcagcttcatttggaagcatccaccgagtgaattattttaaattttacattttttgatcgattttgtaattttgtaaataaatctgataaattttattattctcaataggaatactgaaatccccaaatacggtggtggtctgttttatccttcttccaactatttaaccttatttaactaaaaaagaccgtaattaatcaaaatagtatatatcatttatggaatttatggagttataaaaaaattgtaaataaatatgtgtagaaggagtgtgtaatttatatcaacccagttatataaaaaaaattcacaatataggacataaaatttataaataaaaaatttatcaaaaacccatttatcgaataatttatacgggtaatagttatttttttacagtcgcatccccaccattaaaaatatgaaagacaacaatatttctggagtcctgaatcgcataggttaaaagcatcctttaggatgtcatatataacgtcatacattgtcgatcgtaatgagttttatcacaccgatcaaacatcgcaagaaacgttaagcagcaatccccaaataagattgcagcaaatcgtcgaccaactaaccatttctcttgaagatttaaaggatgtttcacacaacttttattctgagttgatgcatggtttgaaagctcacaggaggcacagaaacttatggcttccaaatgagtgttcattcaaaatgttggactcctttattcctaatattcctactggcaaggagaagggttcatattttgctttggatttcggaggttcaaatttcagggctgtacggattatgattgaaggtgatgggaagatggagcgtaatcaatctactttcagtttacgttattccagtgcacttggaccaaagggtcttcttgatcagaaggctacagcaactgaactttttgaccattttgcgaagaagattgaacatgtgatgaaggaatcaggtgttgatcctaacccatctaaaccacacaaggttggatttacattctcatttccttgcactatgttatcaccatgtaatgccattcttttggattggactaaggatttcgagactggcagggctacaaatgatcaggttgaaggaaaggatgttgcaatattgatgaatcaagcattcaagagaaataatatgaatgccgaggtttcaattgttttgaatgacaccgtgggaacgttgttatcgtgtgcttatcagaaacccaaggattatcctccatgtagagttggtgtaattttgggaaccggttttaatatttgttatgtggaagatgaatatgaaagattcgggtatgttggaagagtcgttaatatagagtgtggcaacttcgacacagagcttccattgaatcctgttgactgtgaaattgacttttatacttccaatcgcggtcgtggtaagcttgagaagctggttgctggagcatatcttggggagatcattaggaggttcatgattctatacctcagagaacaagcccctccaaagatgtgggaaataggtacattcacttccgttgacgccagtgagattctgaacgacaactcagaggatttggttatatcaaaacaggttgccaagagatcatgggatgtggaattaccaaaggagtccttgatagctctcaggaagatctctgaggctgctttcggaaggtctgctggatttgcagcagcttccatttgtgctacagccaggaaggctaaggcgtatgtcacatctaaaacaactgttgccattgatggatcactttatgttaaaaatgaatggtataggaataaattgcagtactatattgacaatgtaacaagaccggatcttgttggaaatgtagttttactatcatccgatgatggttcaggaaaaggagcagcaatagctgcggcaatgtttatctaacgttttgtttttatctacactacttgtagaatctttaacatcattacactttaattttttgttccttcccgtaacttagataatcacaacctacttaattttgttaaatctacactgagttaatcagagtctgagtatccttcaatcacgttttcatcggattttacttttttatcaatgccgtccttatcatctacaaaaatgtgttcatatagttcgtgcaataaacaaggaatttcttgtttatcattgttataaaggtaataaccaggattattttgcaaaaatttgtataatttgtgtaattcatggttggaatcaagaaatggaagcttatggttcaacaaatggatctttaatctgaattcaaaagaactaccttcctgataaaaaattaaaaaactataaatcatacctgagaaactacttttgctacatattcaatgattaaatatgtttttaaatctattttacaaccagcgggaatttgttttttaacttcctctgggatgttgaatttcatattataacatatcaaaaatgtagtaaaaaattaattaaacgccattaattagaattctaaaaaaatataccaaaataatacattattttttaccacataaaattctatttttgatgtcgttaataaatgatatatatcctttttaaaatgttccgttttatttttaattaattgaatttatcattttatatctaaatttaaggtatgagccaaatgtgtattgattttgaatatctcatctttggttaatcttttgctattttttcacggtaacattattttaaatgaagaagagaacatttattacaaatttctggaacgtatttgttgcaattatcgcatttatctgtattcataattgttgttgtttgaataaatccaattttggtgtgtggctataatatatatccatttcaaaatgttaatatttgtgtttagaagcagaggccgacttattcaaaggtacaacaaactctttagtgacttctatcacaatttaaatttcagatatcgtttccaaattaaaggttgccagtgaatctgttcctactcaatcacaagtggtacgtaatattttatcattttatattatttgcagattgataaaataaaaaggtatgttttcagcatccatattcgttagtatcgatgctcaagaattaaagaaaatcgatgataaaatcaggaaagaagaggccgaagaggctaaggatcacgggaggtttgttgctatgtcataaaattcaacagttgcggttctgtctcttatgagagagattattctttcgaatgtccatctggtaaaaatagtaatacaataattaataacaggctggactctaactgatgacggtacttgctggtatgaagtggtgtaggcattgattttaggggcatgaattacaagggcagctgtgactccaggcaatcgttcaaatggttttcagttgatcagaaacgagatatagttagtctaattgttgtttaaatactttaggagaataaatgctgtgcattttggcctaagaaaatgacagcacgggaggctgtttccagagttggtaaaatggaacttgttcacggaagtgttagtttttatattttactttgtcttaggtaaactttcaagatggaagaattatactcccaagaaattgaatatattcaatattaaattacaatcttatttttaaatgtaatattggttgaaacttgaacagggatgccataactcctgtaccggatccatcgtcaaatatttcacgatcgttagcatatctattgagagttaaaaataataaaaataccccaatgtcagtaagaatggtggatggtgataatttaataatccccgcttgtttcctgatcctctatctctaatcagtccaactagttgaataattccgtgaaatcttttattaaatttaattttgttcttcaggcttttgaatgatttcttcagatcagttttctacacaaatttgtcgctaatttcaaataccgaatcatgtttgtttgggaattctgtatatagttcgttcatatggtacatatattcttccaggcgcgatactgtatctttgactgatgcatttgattcactttcagacatgaatggcaatatactcttcatttgagtcttaaatttgtgaataaactaaaaacatttttaatttcttgttcaaacctgatctactaccagatttatgtccaatttttttctatgttcagtgaaatattttgcaaattctgttttgatatcattttccaagttcttaatgagtctaaaggaaatttattaactatatctaacctttccagacacagtttagcattatgcgcattaattggttctgtaaaatcagttggaatatttcggccctaataaaattttaaaattctcttcttaccagttggtccatcacaagtgtgtagaatgaaactttagagtcaaatagctgtgtatgatatttggctgcgaatttgtctattttttctcctttcaaagacctttcgagagagtcgtcgacaaatttctgaatcaatttaactattgctggaaaataccgtgaaattctcaaaacacttggtccttacgtaatcaactaacatctgtgtggaattatttggtgtattgaatgattttaaaacatcaacaacatctaaaattggcatatagaatcaagtttacctttaatatttatgtttgatggactgtcaaaatactttgaaacggtaaatttagtgtcaaaatgattaacatgcatattcattttagggaagaaatgtttcaaattactttcaagtgatttgatttgcgatttatttggtttcacctaattacatcgtgaattttgaatcaattacctttttttggaacgagttaaagtcaggcagaacaatgtatatatcttttgaatttttatcgttccttcctagttctaaatctagcctttttgataattgttcaaagaacatctttacgttctggttcaatgttatttcttcattgttcaggtcaaaattatcttcgttcaagtaaattaggatacactttgacagtgctgacaaattaactattgatttgttgtttacggcgctttttatttcattttcaaagttaggtatttcagagtccagaagtaaattatatccatcctgaacactgtgttcccagagattatttcctaaaacattataactatgtttctttcttacttggtttcaatggtccgcttatagttgacgatttggttggatctagtccgaaattattttctacgaagaatctctgtttccagttatttgcacctatacatgagactatattacatttttttgtgattttggggtcatccaattttttgcaaaggttttctaaggaacttaatgacaagcccaaaccaaggttatgctaaaaaatatgtttaatcagtttatacttacatttgttttgattaaattggaatcacatgttctaatgagtgaacttaacagtaaaataattttcaaaatatttttcaaaaccatttctcattttttaacggttaaatataggacagatttgacagaacaggttgttatatgtgtagataattcatggaaaattctatattcaaaaagaaaataaatagtttaaaattcagcaaaacattatataaatattattttaattagcttttgttatgattttagattaattttataaattcataatacatagattcttatgtggagtatgttacacatgatataaaaaattttagaatcttgttaatttataattattcttttttatatcgccagatatatgtatttttttaatttttataacaatgtatttttaatgtttgtttattcttcagtgattccttctaattcgtagttgttaatatttgtgcttaaattgtatctataatatcaatataatttattcctaaagatgtcgttaatttaatttttataaatttaaactttcaaatattttaaatgattaaatttactcatttaatcatattgcttcttctagcacattgtgtaaaacttgtgacttccaatgtcaagtggacgaggctgaaatctggccaattcagtaagaatccacaaaatttaactattttatatttttaggaaacaagattttaaagtttgcggcaacctccgggaataactcgcagtatatgttcggaggtgaaatagatggtgagggtcaacaaacctttcatataaacatctgaaactttaggaagatacacgaataatttatttgtattaaacgatcccaacttggaatggtcaattttgagtgcaaatggtagtttcccttctcggcgttcaggttcaacactcaccaaaatcggttcttctttgtatgtaattgggggacataatgacaatgggaccttgaacacgatatatagatttggtttgttgattttaaccctaatgtgtattacgcagatacattaacacttaactggagtgaagtgattccactgaacgacgtcgagttcgttaccagaagtggacattctgcaacaactgacgggaaaaatcgcatttatgtttttggaggctacaatgatgtattttctactaacttgacttgtttctataggacggctattttttaaatgacctatacaaaattgatttaagtatcaagtacgactctgattacaaaacatataaaacttacgctgaatttactttattaagtgatggtactcttatatattgaacttattttttcagaaaaaagtattttgaacccttcgccaagagagtcatcctccctaatctacgtaggttcacaccacacaaattctttcaggccgattctaaactatatttgtttggtggatacagttacaccggtaagttacgggtttaataacttttactttagccgcctgcaccgatggactgtaaattaattatttaattataaaatttaggtggatttttgacttgtcaacaaacaggtggtacaaatcaaaatctcatgtcttaccacctcccggagaaggttaggtttaccttatttatctttttagggtacacaggtattaggatgggtagggcaattctatatttcggcggctgcaattacacttataatgctcatcgatgctataagttagtttcccactaatttgattgtgtagtaatgtttggaattatgatacaattggagataaatggactattgtcccttcttctttcgaaaaacctcttgaaaggggtcattcatttcttttttactctcaaagttccttattaaaattttaaaatatttttagactcgatcattctgtatggtggctccaaactcgataatgtgatttataacgatatgtggaagctctctatgctccttccctgcaccgatccaaagtattcttgtttcggaaacggtacttgtttatctacttgacccaaaaaacacaattatttatttttaggtgagtgttctgggtcttcgtgtacttgttttactgggttcctgggtcatgattgtgggactgaacagtaagttaatactataaccgaactcttcagggtggaagagaaaatcacttctcctgatcaagaagagttagcaaaagagcctgagatttgcgacgctaagcaatctgagactagttcacgtgttgtacgtgttttcaggtttctaaaaagccatgtaaaaagatacaactatgttacaatattagtggttgttggtgttgttttagccctcgccgccttacgggcgcacatgaagagggactaatctgtgaattttttaatagctctgattacaaagttaggtatttgcgtttggtttcctttcccaataatggcattcttgcattcagtaagccatgcgtttgttttcttacacgtccaaaactcgccgtagatcctagtagctacttgagggagaattgcgttaatagttttctgttgatctccatagcctaacgattccatgtgttcaatgattttatagtgggcatatatcttattcttaataaaagaggccaattctccctttataaatatatttctaagcatctggttaatttgagggctctttttatagctactaacgatatcagctatcttcttcaggcgttccctccagtattgattgaataagtcgaaaacctgagtgtgtttttcagaaaactcatcgtctttatctagctttaggacccatattttgccttgtggtttagccacaccacataataagtcgttggctagtttgaatggcaatcctgtggcatttctgaaaatttcagttgccaatttacagactgaggagctatctttaagtttcggttctgaggactgtctgtttagtaggcaaagtaaaaattctctgcacgacactaggtactccatctcctctgggttacattcgtcgtcttctgtataattttcaattgcatgaactgaggatagcacccagttaccagatatgttttttgagaactttccaagtagccttatgagatcttcatcttcaagattattatggactatatccctcttgagtgagtagaatgagtctatagatctgtgcgataataacaatttcagctgcatttccacggttagtctcttcatgaacctaaagtttggacaaaagtcgtgagtctttgtgtaaatatgggttataccagaattatcaataccatcttgatccttagagcaagagtgaaatttagaagtcgttccattaagtgggacacacaatgaatttatgtacatctccctatcttgatcaaagtttattttgggattatcatatgccttcacatcctttccgtacttggtgaactggtcgattaactctttagattcaaaagattcaggatagaatattctgtctacttttttccatgttatgtttctgttgtaaaaaaggcccagaaaactatcatctgaggataaaaaagtttgattaaatgaatccagttttggtctaagttgtagtatagctctaacaggcaccaaatgtaattctctctttaatccatgttcggtattttcgatcttcagtaaccccaaacaatccatcacatgctcgctggttgagactgaggactcaaatgttagtacatttgaactttctccgaacggtttcgaaggtccaaattcaggcgagctcattggatcatattcttctttaaacagataggtcgatttatggctctttttaatgggtgaagtctttacgttgagtgagtaattagggcctaaatcatagtttagcctcaccaatggcgagttataatgtctgttaggcttttttgcccttgaagaatatattttcttgttactcaagtcgttgttttcagtttgttctccgatttcaaccgacttgaggtgtaacttatccgatgcgtttgaattgatcttgtttctgggtatatcatccgaggattctccatttatatatttacacgtttccagtggatattgcaacagcagtagtctattgaaagggttggaagataactcgtttaaaaagggtatatgttctggtaatttatcaaagtaacctaatatatcgctaagggtaggattagataagtacacatctagttcaaataaaaccggatcgtcttcctcttcctcaaatcctccaaaatactgagccattccactcaaataatgaaataattacgaaattcttaaaattactaataaaacagactgcattgaaatatttgaaattaaaacacataatttactattgcattataaatttaagtgaaatgaaaaatatttaaataaaaaaatttaggaatctcaactgaatcgactcattttattcactggcctatggggaaataaaacagatttttattacattaatgattttaaaataacttttattattatttttaagtatatttttaatattttaaacacattttaatttgaactagtgtatttaaaccgatttttaaacgaacaattacattttaatataatgctatcagaaaattttaaatttttatcaaatcatgaactcagaatttatgattgattttggaaaggactcaaagccaccagaaagcgatgtaattaaataaaattaaataattttaatttagggaagaaatcaggaggatgacacattagataatttcacaagttcgatattatctcagtatgcctctggattgaacccaccaatatgcaaagtatcttcttcaacacaggatgcgccatttcaacctgaaaaattaccgtttgatttctcaaattcatctaatgatgatagtaatagtgtaaactcagatgatttatcgacttttaataactgtataaataaaattgagattctttatactatgtcaactaagttagagaagcaatggaatggtaattattattttcaatcattttaatttagactggtttcacttgataaaggagagatcaaattacaatagatatgacttatctctgaagaaaccatcaatttggaagcaaaaccacaatttgaatgatttacacttagaatctatatctcgttggattgaaatatcctcaaacattttgtgcagtttggcatacaccttaaatatagatagcaatctgtttgatctgaatggttcaaagctgttgcaagaatcaattgacgaggcctattcaaaatttaacactgacatttcaaaggtttgggaacaacccaacgttacaagccaacaattaaaaaatgattttaaaaacgactatctcaaaatgattaaatttaacactagattacaggtatttttacatttagttgttatgttttagtccaattacgagaggattcttgaaaaattaagaaatgaacgagatgaagcgatttcaaaggcagaacaaaaaactgtgttggaaaaggaggtattatttaattttaaatcatttaattatcagatttgttcattaaagaaccgaatttccaaattggagcaagaattagttaacaaagataaggaaatagaagatttgaataaaagtttagagtcctctaacaggatacacctccaggtaattaagaagaatgaagaactggtgtcaactaaccaaaagctcatgatggataaaagtaatttcattgataaagatactgcaaaacaaattataaaacaatattatgacgaagaggtattaattatttggagaaaaaatttgtttcagagcagaggaggagaaaggaaagaagatatagtccaacttttggagagaatgttagatataaacatgaaatccaaaaagtcagaagcatcacaacacgaaaatcgtcgttcattactaaacgagttcatggaatttgtaaatgaaaatgtagaatcccgataggattctatacttctagtattttaacacattttaaatatattctaagtttggcattttaatcaacaatgtaatatataatcttttaaaacaagttgtataataactattttttataattgatgtaaaatttatatttgtgaggtccttccgaaaattattgattatatttggatatgtttacaaaacatggataactatatttacagaaaattaatttttaaaattatcatttagtaagctgtggaatgtcacctcagggatcagccccgttctctagtattttatatctgaccaagagaaagaggctctctgaacacctgtatgaacagagagatgaaactaatcattcaaaccatcaatattgttatgaaaatgttttctacccatcccaacgacctgaaaaatatggaaactcaggattatataggaatctagtttacttatcagaagatagactaaaatttgaaacttctgatggagttgccctggatgttgatgatggcttaaatagaggtttgaattatttatcgcaacactcacatctgatgaatctgggcgaaattgaggaatttttaaggatgcaacggtataaaactcaggttcacgaaaaagttcatggtaaagttgaggatatcgcaaatttgttagatttaaatgacatgaaaaacacggaagtttcttactctgatccttttgaacgtgatttggaactttcagatagatatgtaggcccactgaacgcctcagaggttgctcatcttatagctcttgctctaaagttgcaggaaaatgaaaaattagactcagatttaggtaaaaaactggaaatttcagcgagttcttggaaaaattttaaggtccctaatactgtaccagatgaacacatatcttcactgtttatgaataaaccctatcaatgtgaaacctgtggtcttagatttagcttgagtgatacaaagagtagacatgagctaacacataagcagaaagttgatagattttggcatcctctagacggatgggttcatatgactagtaagggtacaacttcctccacgtacacgagatctatggttacattggaaactttcaggaacttgtttagagcaattcccttggaggatgagaatgttaattggcttaagggtcttttatttccaaatgaccatgcgtcaaaggatgttgtcatgactgatgagtttcagcaaactaatgttgagtttgaggaagaagaggttagtggtactagtgatcatttgagtgatgagactactctttggtcctggggaataatggataacttggatgaacctatttctataagttccacacaccaacaacctgaggatgaggattttgatttagctctatttaatctgatgttgaagagtgtttcatttaatcttttaatgttaaattctaaaaaacctgtttttggcacctttggtgatttgtcgaagtttttctgtgtgctatgtcaagacattttgaactgtcaatttgatgtaaaatataataagttcgcttacgtggatactatttctttccagctggaccccaatgttatttctaaagtttttaaagaacatgttctcatatcaaacattttatctcttgacgatcttgataaattatcagtgtttgatttgctgaagaagatggcttcaataaaggtggtttcgccagataccaagtctaaacttgactttgcaattactgactggagttttaagtatactaaggatctgctcggcataaatagttcaatacctaagatggatgatgtaaaatactctaataaattagttaagggttggaaaaacccatttaaagagaatgacgggtctagtgcaaggtctctgctcatttcacacacaagttgcctaaagctattctttaattcgcaccttaggcttgtgaaggtaaaggcgagttatgtaaagaatgaagaggtaaggaagaaacttaaactacttaacttggtttaatctcttactcggatttatctatcatataaaccctgacaccgttggtgagcctgcaggccttgtacttctccccaagtgttacattagcgccctttttatagtacatgtcgttaagtggctttgtatctacgttacaaaactttgtcgagttgaacctcagaagtgggctcggcttaaaagtgtttgaccacattctgataatttgataaactgtatttgatatatctttaaccttttctatcattatatatatttatattaaaattttctttgtgaatttgaaattactgggaatctggcttcaagttgtctagtaacctcctgattaatcagcttttgaagctctccttgccttgaatcgatgttatcaagtctctgttttagtctatactcctttctagactcttttagtgcacctctaacatattctgcagttattaggccagcagcaaccgtaaaaataaagcattcaccaagaagctcacttccgatatttacagatttttctggagataaggtgaccttatcacattcagtgacttctgagttatagaatcttcgggaaatcgatctttcaaatgcgaagctcttattaccaaaatatatacatatgtttcgaaagcgttcgttatgagcggctctcctcttaagataattcgcgaaaggttttgaaatctgtctaataaatacacataaaactttatatgccggaaacataataaatattaatttgtttggcgttatttgttatgattccatggatggggtctgagattcatccagcatacattttctgagtttcattacacctttaattcttcctctaaattttgttttaattaagactgttcagctcacctttgatttattatattaaatttatcagctcttctgggtgggctcgtaaccattgctggccttctaagaatttttaatattcaattatctaaccttaaaaagtttacaccttttggtacaaacatttcaactatctttggtcctgttccactgaatgaaaaccatcccaaaccacaaattacaaactcatctaacgggttcggtccgttgcaattaacggttactctggtaatttgttaaatatgtgtaaaattacctatattttgaaaatggcaggattttatcataatcatcctttgagtgtggcgggaacaacttgtttcctacctggtgtttaactatatcttcacttgcaacagtcctgtttagatgttagagtattttaaacttgcctgcagactttcatggttattccattaccaaagaaacactgaacaatgcatttagagccctgaaccaggtcaactctccccagtgctccaattaaaagagtttgtccttcatcaagtttaatgtacagaggatttatagttttagtcattgaaatcgagactaagtctacaggtttgtagagaattgagggaatttgagatataattggtattcctggtgtatctactaatttaaatccacttgggagaccaaattcaatgaattccaaagtagttcctggaattgccgaccttgttgttccacccacactacgccttaaattaagtgttccaacatgcctaacattacttaaatttatataattcatacttgtatctgataaaatccaaaaatctattcacaaatgttgattttcctacattagttgctcccacgacgtatatgtttcttggatcaccatctttcaagtattccttgaacctattttcgagtttatcgaacccagttccttaaaatttttataacaattaaaaagtaccctttgcgcttgacaccaagattatatcagaacttttagaatttccaatgtgcctcactactgacttcagccagcttttaatcctaaaatactcaaattaataaatttactaacgctgactgctccacaaccttaggtagtacgtctatcttatttgcgatccaaattacctaatatatatacgatattagaaaaaactaacatccaaagctctatttctcagagctatataaagttctgggattactgaaatctctaagtttgtcaaatccaacacaaataatattaaactattgtttttaattcttgtagccatattactaattatttctgatgttgaagagattttgactgaattatgggctatgttggtctcagactccagttgagtcatcaagactggaaattgttttgagtttaggtttgaggagataactctctttacggagtttcttttcaaattttctgtatccaaaaactctttaaccaacatttcacgagaggattcaacttcatttttagtatctagtcgtttgtaatactaaaatttacatatattcagaaaataaacctgtagtttatagcatctttgacaaatcactctacgtttttttgtggaaaaccttccaaattcagcctaacatcaaattaaattcataaaaaacaaccttgtttacttccacgccttctggagcattttcgatttccactcctcgaatccttggtagcttggatgatcctctagctgcataatatttaacaattaaatgaatttttataatgtttatacctcctgattcgttaagaacatcagaacacacatatcctggcttgttctggtctatagtctggaattgagctccacatcctatacacctttttggaaggttgatatctttctgtaaaattcattaaaattatgaaaataactaacatagaacggatctgaggtgattccaggtacaaaaaattctttagattctggaagtccaaatggattcaaggtacttttggattccacaagttgtgtgtttgattctgttgtaaatttacggaaattctaaaaataaacatttaaatctgtgtatcatactctatatccgaggattctgcacagactgactctggcacatcttatactattatacatatgaatataaataaatttacattaaattacacaaaattattttttaaaatttatagtgttatactctgaaattcctgaccatattttccaattcttctgggtcacactccaaaaggtcaacgttacacctgagaaaaattaaaactgagtattttacttgtaaaattgtttaattgactctataagcgccatttcatttactgttatcatattaattgccattcccctaactccaaaacgacccgttctaccgatacggtgtagatacgtttcctaatgacaattttaaaatcaggttaatattaccatgcacactgatttgagttcagctgttttggctcctgagtacgacattggaagttcataatttataacaagcgtaacttgtgggacatcaattcctctcgccagaacatctgtacagatgaggacctttgtctctccatctttgaattccttcataattctatccctaatttcaggtgtcatagaattgggacctgaactcggtcccaaggttccacacaataaagatacagcatggctaaatatggtttatatttaaacgttaaaatacccttgatcgcgcatcctttgagaaagtttaaatgccgtttctcttgagttcacaaatattactgattgtccaacaatcatgcttgagtatatttcagagagcttgttgaacttatcctcgtcatcattacagatcatgtacctttggtcaatacaatccaaggtaagttgctctcgtttaacctgataaatttattaaataaatgaacgaacttgaatcacatgggctctcggtgctattttagttgcgaaattatatacattgtctgagaatgtcgctgagaataatactatttgtacaggccctctaaaaaagtttctaatctggagcacttgtggtcccatgttattctgctggtttataagttcatcggcttcatccagaaccaacatcacaacgttctatacaaaattttaaactataaaatctaataccgtaacattcataattctctttttaaggaaatccattgtttttcctggcgttccgacatacaggtggtactgatcattatcttcatctaagaaatttgtacaagtgtatttacttacatcttgggcactgtggaactcccaaaaaacatttaatttgtgtaaactgtcctaatttctgtatgacttggacattctgtgttgccaattcacgggttgggcaaatgcacagagcctataatttcgtttaattctaagaatatagttacctgtactaagggaacattaacattaactttggaaagcattgccaatgcgaatgttgctgttttcccggatccattttttgcttgagcgataatatttgtactaaaatgtgtttattattgataaaaacaaaccagctgccaagaatcagtggcagtgcgcactgttgtattttcgatggctttgcaaatcccatattctgaattcctttgagtagatccggtgataacggtagttggctccattgcatattaatgttttcgttgaactgcgttccgtcgacgagcaaggcatcactattaagtaaaatcaaaaaaatctactatgaattcttacgagatttcatccagcattacatgctttggtctcatgaagtcatttgaggttggtgctcctattaaatatataatttttgatattaacaaaccataatctaagtttaaattcatttgtctctctgtatgcattgttcccaggtcttggttatttaaatttgtgttaaattggttttggctgggagggttgtttaaaaattccatactttgagagcataattgcctcaattccttgttatcatctctagccaagaactgtttgaatattgaatcgctatccatttctcaaaaatattttaggataatttttatttgaaaatatataataaattggtataaaaaattttaaaatgccttagaaggttttgttacactatctatagggtttatggataaacatttaaaaatattaaccataattagactaaaaatcaaatggttcaatgaatatagataataaatatttcatcttaatattacaatattttttcaaaatttggatttattctgaactttaattaaattggattcttaatctctaatcatattgtcaattaaatatactattttaaaattttaattttattaatacattctttcttttaagataattattcttaacttatataattcttctttccacatattttaaattctggaccaaatctctaaatgtagtcattatctgtaatagtaactaacacatttgaatcaaatgattcttaacttaaatatctctttgctggaataacagtactcagttgaaatgaagttgaatctaataattatctagatagccacaatattgtgaataaatttaaatgatttatcggttgtatttaagtacaataaactgcagagcaggaaatcagctaaatgtgtacaggaatattgttcttttgtgaatattcaaatagagcagaagaagaattttctcagctacaccctatgattccccatgtatgatgacagcaactggattcttaaatttgttattataaatattttaaaataatcttgaaatcagttggaatttcaaagttagttatattagattgggaataaaatagttatttttcatttaaaggataaaagaatcagttgattttgataaaaagatgaaattggccgccagattaattagcctttactttattatttacattttacattccccagtgctgggaggtaattgtagtcatgaagaactaaaaaaattgggaatgctagagggcgatggtttcgacagggatgcattgttcaaatcatcacatggtatgggaaaggtaggaaaaaggtatggtcttaaaactactccaaaagtagataaagtcttagcagatcttgaaacactgtttggaaaacacggtcttggtggtattagtaaagattgtcttaaatgttttgcacaaagcctagtgtgcgtattaatgaaatgtagaggagcatgtctcaaaggaccatgtactgacgactgccaaaattgctttgatagaaactgtaaatctgcattgctggaatgcattgggaaaacaagtattccaaatccatgtaaatggaaagaagattatctaaaatacaaatttcctgaaacagatgaggacgaatctacgaaaaaaggagaagcctccggcacttcatagggatgaacagtgtgaagaaaacgatccagatctaaaatccttgggagtaattttatagccgttaagttcaaaatgttttcttgtttgaggattttcgggtgatgtatgtcgtaatttgctatattttaaattacactatcctaatgaatttgtttgtttcgagttcattaggaaagatatgtctgaagagatttgaaagtgggtaaaagtcttcgatcattggtgttagctggtacaggtttaggaggcctcagacgaacacaataagtgataaaaccagcttgaaatcaactgagacttcaatagtgtagcttacaggagctaactttaaagagggttaacctgaataatgtagtaaatatccacattaggagaaaagtatattttatgagagagaaatattttacattatccttatttagaagtgttttattttattcttaaaatatagtttataaaacactaaaaatgagtttaaacgcaatttagtgtcttttttatgaggttgaatcacaaatgactatttgtatcaaaatatcttaaaattaaaattaaacgcctaaaactactttaaaaactttatacaaataatctcacgttcatgtaaattttttacagtgaaaaaaaccacccaatgcgaagattcatgtgatacaaaatctagtggtatggtctccatttattcccataaaacttcaatatatttgatgaaattcaaaatatcctaattttattaaattagaaataatcttatatcttatggatgaataattattatctttaaaaatatgtgtataacatatatgagtgggtgtgtatacaaactaaatcctgggacctggttgttgtcagaaataaatgtgacctgtactcatatcctaattaacctttcaatcactaatagaatccatttataattaacctttagattagtttcaatatacaatggcaccatttatatatcttacgtatataatattgattccccttaatattattaatattttttgatatttatttgtaaaatttaaaatgaaatgagtaatttctaggattttcctacacatgtatattatcttttcatattactcaccttttccattttttctaataaatttgtttttttgtaagtgccttctcctaaataatatcttcggggtttcaaataaatttaaagatcgaaattttaatctttttttcttaaaccatacaagaaatttatcgcaaacttacaatttaaaagaggttcaaaagtgtacactaccttctaaatcaaaaaaactgaactctcaactaaattcagtccatactgatacacatacgatcgatgatgacgttgctaggattttatttggtctagacgaccctcttgagattggtcgtacctatataaactctgagggcaagataataaataagaaaaagagtttgtactcaattggtgatttatctcatgtggacgacttctttgagggtaaatttcgtgtagaatggactgttagaggtgttaaagaggtacttttttaatttaaaaaacattttttattagaaactccaatatcgatatagagatagtcacacactacctcttacaactagtagattcagtttagctggaattaaggggtttgttcttagactttggctagacggtcataaaggatccaaaaaggggtttgtcactttcatagtaattgattttaggcatatagccatgagtctggtacaacaggagcactggacttctttagactctccgatttgtttatttgctgggaaaatagttaaagggccttttttctatagatcccctgagtatacccaggtatctttaacactttaatggataattcagtgttctaaatctttttgtccacttgaagacgttgttgaaaataacaccattaaactaggagtaatgatcgcaaagcgtgaggataactctattaactctaaacctccctaactcattttaacccacctatataaaatcaatatttgatacatgtatatttacacataaattatttaatagtatgacagttgtaaaatgtaaggaaattaaaaattactcatggctggggagcctttcccattataatttcagaggcgatctcggaagcctcctttagaagttgtgctgacaaagcctcgtcagcttcagcggctctgattctttcttcttccagctgtcgtttcttagcttcctgagcttgctggattgttaattgcagttgtagtctcttttctcttgccttttgtttgttttcacatgccttctctagatgtggaagagtacttgtgatatgaggcataacttttgtttttactcttgaaaggatctgtttaagtttattacatgactcgggagtaatgaacccatggcctctctggttcatcgctaaaaaatagtctcccgtggttgtaacaaatctacatcctgataacatgttattcatctcaactacagagtttgtcttttctgcgtcacgtaagtaagtacagatcatcgagtctgttactataatctggttatatgcgaaaacatcatcttggaatatcaattttgctgtttccaacattgatatacactcttcgaacttttggacgtcgaacaggaacctgatgtagcaaatatatagatttttatccatcttcccattggaaattgcggtttgaaagtattgttgtgtcttagctacttttaatttgttaagtttgttgcgatcaaacttcttatctgtggccatgttagccagtgtgatagctgctgaaactatacccatgttcttattcactagcagcttcatgtggcttgttactgaaagtgactctaaaagcagcaggaaactctcataagaagcctttaggttcttgtttagcgctaaaagcactgctatacaatttgctgcatagaaattacacgctgacggtctctttaatgcgaccttcgcatactgcattgcttcttttgggaatatttgttgtgctcctatggtttgtggcagtttatagcttttccttataataagtgatgctaaaagagtattggcgtatgggtcatatgttgaaactggtatcgttctaaacattttccttatctcatgaattccctcatcaaatgaccttagtctccccaaatgataagctctaagtaaatagggctcacaactcaacgggtgtaccttcttcacctgatccagataccgaacactattctcgtagtcgcactaaataaaatattatatttaaataattgttgcaaaatacctttctgaatgccatgatgctctttctaagccacggtggtgtgtaccttgggtactctcttgtcaatgctgaatatatcttattggcttttgaaaattggccgctaaactccagtgccagtgcgtagttaaatcttacagtcaaggccattgtttttttaacaagttcttcatttaataaattacctgactcttttgactctgtattcataacatttaaatcagttgtgtgatttggtgtgccggataacttttcattaagatcctgaagtactttacaggctttggtataattcctagtatacattaaaataactccaaaattgttaataaactgtggactttcgtttttatataatttaaaatactcagagtaataagactttaggtttgggcagaaatattctcttcctcttgacaccagcatctccatggaccttatgtagtactccaagactagtgggtcagaaaagtcatttttgcctttatttaacattttaaagtcacctctattccccagtttaagagaatcatcctgttcttcttctttttcatttgagttattcatggtcatgagatcatccagaagtgaaagagccttaaagagtctttcatctattagtcgccccataccttgttgaactgtgtggaacatacatgatatatcaagttggttttgggatttatttactgattctagctttagcatctcccacttattcgtttccagtgcttctcttgctgatgacaagtaaacatatgctgaaaccttgagtactattggaactttatgtaaacactggagaaggaaatcgcagtgttctcttgccaatcccaaatctgatgaccctgctgataccttaacaagctgtaatctagcaaccataaaatcactcttgagtgatattgcatttaggtagtgacccaaagctcctgagtagttttccttgaagtgctcaactcttccaagttggtactcaagttcagatctgaggttataggggaggttaagcttctggagatcttgaagtctttttttagattcttccacttcccccttatgaaacaggaattcacaaatttggagctggctgagtgggttagacttatccattgcatggcataaaagggccgcgtttgcgtattctttaaaaagacgcggaatttcaggatcgttttcgtcaaaatcctctttaaaatgagtcagcttgtgtgcgattattactgatgagagtcgatatgaaaatgacattggcatcacagatatggacttatcaatgagcaccttagcagaatcaatatctcccaaataaaactggcatgaggatagtgcaaacagaagaagtgctttcagccatacaagttgtgattgtgccagtgataattccagcataatctctttgctatcatctgcgattttaaaataattatccaccatggacagataatatgtggtcattagtaatgccttcatataataaacggaggctatttgataattagtgaccattgtcataatgtttccagatagaataactgggattatccttgtagtattcaaattaatggccatctgaaacattgaccttgcagaggacaaatggtcgatattctggtcccttgaaaaattaagcaattgttggtgcccttttaataaatagaaatggtacattgaaacccctatgtgttaattgaatcagttatattactcaccttcagtttttctggcgtagtgggtggtccagtccatgtacttagtatgtcgttcctcgtcatttttaaactggaatgcctgtgttagattgtggtatgccaaagatgagtaaagtggcccgcctaaataattagatttttatgaattatcattaggttggataaaaataagaaataaaataaaaaaactaactttgatcattgggaaacatggtttctgactctttcaacagagaatctgatgattctgagtgtcctagtgacttatacgaggaggcgagaaacaaccaatatctcagcggagttttttccgctttcaacatgtcttttatggcctccaaattgcctggaaccaaatcttcttgcgataaccaaacacatctcctgtcaggtccctctaactcatggttaaacttatttaaattcgattgtaacggaatcccgaaaccgatatctaccatttttacaaatatattttatatccctctaaatttgggattatatttacaaaaatattttaaatcataatataaaatacaaatttaatgaagataaatatggactggggaattacttaacattataattcccacttgaaactcaatcatttttattcatttgtacactaacacattgaaaaatgcttaaaatagaaaatgattaggttaaggcctcatttgagatctttacaatctcatgtgagtagtggccagattccaactcgtgagtatctggaatcttttgagcccaaaagccttcggcgtttaaaagtttttaatcaaactccacctgaggatattcgtaaaacattttttgaaaaattgacatctcattattctaatcctcgctctattttaaggtatttatccacttctaatgtgtaagtaggttatatcgcaaatacatatcagttgatgattatccatgttattcttggttagtgcgttgtttttgtcaacttggcaactcattttctttcaactctttctggtattctttgtattttagtttttactttttaggtcacccagagataggcaggccttagttagcctccctttatttagatacttggtttttgatctcaccgaacgtaagcattatatacacgtaaggtgaaagttctttttatattactaaatttagccccgccatgttccccggatgatatttgctctatctgccttggagtatcgttcctggcctttacttacacaccttctcgaattggtccagaaacaccttaaggtagtttatctactatatagttgtccttaggattggagaatatctactatctctgtaatgattggttgtttggttaagttagggctggataacattcctaacaattcaaaccttttacctaatgtaacatcactgttattaaatgaggtggagagtcgggatcctagctattcatcaccttttgactgggctatactgtcatactctttagttttaaccaacagatacgaatggtatctaaaagtttatataatattgttaggcctaactatgaaaacgcgtcgcttccagtcttcttgaatcgggcttgcaaagggttaaacttggagaatttacccctaagtggatggacacaatattatttatacatttcattatactgtactgatgttgagaaaccgagaaacgaaattcaaataaaagagtcagttccacctgaaatacaacagtcactccacacccgatggctcaacgagatacttatccactcacaacctcaggttagatttataatcatatatattttagggttctgagatgttgcagaaagatgttgatactgtcctagagggtttaggaaacactgagggtttaataaattgttcagttggaaggggggatgacgaacaacactgtctatttactggccatttattcccaaatagaaaattatgttttgaatacaattatcttatgcctatgccagacggaactccagttgaaagcggtcttgtcagtttcagaagaagacttttcaacaaatttggatataacacggtagttattcataggcaccagtgggaaaagctaacaattttggaaaaggaggaacaacttcttcagattttatcaaagttcccaatcattgagtcaaatctgtatgaaagtaagccagaggcaaagacttttgaaggatctaattacaagtatttgaagcacttaaggcctaaaattaccacctggccacctgataagattactctataaactctttaactattcaatttacacctattatatacctctattgtaaagaattaattatcttgaacaagctttacagttattggattttcatttggtgatttgataaatttaactaaattgttttctataagctccttcaaggttgtcgacctgtaaggacatcctacacacgatccagtgaactgaagaagaaaataataaaactgtttaaactaactttaacgtgaacttcgttatcgactattttacacaggctaattcctcctccatcagaagataattgaggccgaatcaggtcaagaacgtcctcaacgttctttgtgttaaggtccattaaccagccttcttcatcatattctagttgtttaccatcattaggtttgtattctaaggaatctgtaggttctgagttcaagttgaaccctttccatctgatcttgtgaattgtgtaagataaattaggggcaagttttagcgtccatgggaaggaatatttacctccaaatattataaaaataaataaaatgaaattatacattaatcatattagtgagtattttgtgaataataaattaaaaccataaattctggaagttccttaggcaaatcttctaacccacattacatttaatatttactaaatgtacaatttgatgtgtagaaaaaaattattatttgtttataacttagattctttttataattttactattattcactttatttaaaataacttaatgtgaatatgaactttatgggattaattactttaaatcctaaatataatcggattttatacactagactatctgaaaatgttataaacaatactttttcccttgttcaggcaagattctctaagattttaaggtggattcctgacacacctcatgcccattcaatgaataaactaacacattttgatgatttgataaactattgtttggacaatagaggtattttctcacagctgtccgacaaatcaaaatttttatagataccctgggtaaaagagatataatagcttcactttcatatatgagaactcttaaaaattttaacttgtcgtctaaaaactttgtaaaatataatgattatatcatgaaaaatttgtcaaaatttgatacaaatatacatttattggttcataggtaatttgtatactcaatatatgaattatttgtaggtattcaattcttggttatagcccatctcttatctccatatatgataaccaattgaagaataacattggaaatcttgacaataagtctttatgcctaatttcatggagttatgccaaaaataacgtttttattgaggagctgtttgacagtatcggtatgtaaaacaaatatttaattttttaatttttagcaactgtggttttaaatcgtaattctaagttgaacttgactgatatatcgctacttttgtggacctttgcaaaaattaacgtaacttaacttcacttttataaattattgattagagaaaagagcctgaagaagttttgaagctcaaaaatgaatttattagtataataaaatcaattcagaatacactaaacaataaagaaacggatgagaatacacaagaatacttagacaaagagggttggtgtgttctaattcatgaaattataggctatttctacacaaatgtggttcatgatatttgtatggcatgtaaatccctttccattcttcttcctggtgacatgggtacaatttcccaagttttcaaaattctattcaatataacaagtgcaagtaaactgagcataacatctcaggtattcatttgtcaacaattttgtacatttagggaataactagtttgtgggaggctttagaacattcaaaccttaaggacgaagatataacagaaaagttgtgtgaagcatcgagatacttgaggttggaccattcattcaactctaacatgctgaattcaattgtgacttctatacacaaattaaggattaaagaccctagaatcatttatcaaatagttcactggcttgaaaaaagaagtgttcagatgcacgcgactcaaatgtataatattatatgtcttttggatcaaatgtgtatataccacgataaagcttggaaacaacttggtattgtggttttaaaataactgtgaattttaggtgtggttgttcaaaagaaggctatagacttggaattataccaaattagaaatttatacaacatttttaaacgaaatggtttggatcctattaattacactcatatctttcacacatctctgtggtaatccttatttaggaaagggaaacgaacgcatatatggaatacttgaccatttcatgttatgcaaacaagatattgaacaatttggatttgtttaattcatgggggattccgtaatattttcttcgttcatatcaaccttaaatataattatttttattatgtaaattaggttttaaaatttatgtctaaattgtttttaaaggccctaggcctttccgataaaactttatcgcaatctgtgttaaatctgttacaaaatgtcaataccactactatagaactaggtacctttttattcacctttttaattatttatatataataattattctataattttctttagatgatgggtttgtccttgttgatcactatggagataaaggagttcgaaaaacaatggaggacgagtgtttagtttgtgattccttgaggtcgaaattcccagatttacctgaagaatacgattttgggtatatttaatttttactcaattatttctccaattatttattcgaatatttattaatttgtgtttagagtttgcggtttatttgatggccatggtggtaggaaaactgttgttttcgtcaaggaaaatcttttaagtgagattgcctctcagctgatttcacatttgaacatgaaaaacgaatctgggaatgaagaggaatttgaaatcacttttaaaaaggccgttaatgatgcctgtcgacgtttagattctaggattgccaatgaggttcctggctgtacggatggttgcactgctctcgttttgtttttcggaaagaaaacagtgtgtattttaaatttgggtgattctgctgcgtatctatgtaaaaaagttgacagcattcttcacggtaggtcatcttaacttagatttactagtatatttattcccaattaatgtaattttttattagcaatacccttaaatgacattcataaaccatggtctcaacgtgagaaggctcggattttgcactatcaaggcactattgagggtggcagagtcaacggacttcttgaagtaactcgttcctttggggatttacagtacgttttacctagttatatatgttaatatcactactacaaacaatttctaggcttaagaagtacggagttttatgtgttgggactttccggaaagtagaccttgatttctccaaggacgagctcattctccttgcttgtgacgggttttggggattatttgaccctatcgacgcctgtaggaagattcttgatatggtcgttaaggtatttttatatttagtttaattctatattaaatttgtaggaggagatgagggcgtctgtaactccacatttaccattcccacaactcaaaaaagtgtgtaaggatttggtggatgtagccataaacgtcagaagatctcaggataacgtaactgttatggtccttagatttaaaaggaagaattaatttttctttatacactaatactatatattatatgtacttgtatagtaatattgtagccataatactatagtactacacatactatacacttatgtatatacactataatatacatataatattatcttggttatattatacatgtataaagcaggttagtttaaaacgtctgacatttccatgacctcttcaaatagtttcttggagttaaactttgctgagattattttacatattaaaaatgcgcctgccaatttgcggtgtagtgagtatatttctggaggcggtggtcttttcctataattgaaaataatatttgatctttccatgcactaaattactgtgaatttattatagtagtaccgttgtgaaggttttactattcttaaaatcatattcaatgtcatatttgaagggatcagctacagaattgatagtgtgggtcaggttaaatataagagtctaataacactgaatagaagaatacctgaggctttgactgagtccaaatgtgcatcaattactatctgggattcttccgggtgtagaaatccaacttcaactgaaagtcttaaaatttcatcaaggtcctagacacatttacttaatactaaaaatacttctctaattgtggcgtatacaagttggaggtaaggcttaacaaacttcctgtgataaatcctgcctgcagaaaacgtttatttacccttgtaatgataagtagaagaggtcatataatatatgtgtataaagaactaacatgagccaaaatccacaagacctattaggtcagtttcctcattgtacagatagttgcttgggttaggatcctataattaattatttactataaatacgcactgtgttcattagttcgtatacgaagatttctgataaggataactttaagattctccttcccactgagtttctggcctcctgactcaagttacccaaatcttctagtggtttctaaaaattaatttaatgtttgggaaatattatttgtataccccgtgaacgtattcagtggtaattactgttttagttgtcagttctttgataacctttggtacgtagaacccttcaagttgcagttttctgaagatttcataaaatttggcctcattcaagtaatcgcattctgctataacttcagttttcatctccttagcgtactctcttatgaaaaaactgtcaggaactagttttgtataggtgcagatccacactaggttttcaatatcgctgtcaatagagtctaaaatccctgggaactggacttttactgccacttctgttccatcctttagctttgctttatgggccttaatatcaattagtaaattgaattgatggtaaattaaatgataggcttacttgacccaaagaagcgcttgctatgggctcatagtcaaattctaaaaagttatccatccaattttctccaaattctctcgagaggatctgattttaattgttaggaagatatggtacctgatcgacttgtgattttggcattatatcagcttcatggcgtgaacttatcagcgcttgtctgaaattttccggcaaaatatctgattgcaaactcaacaattgaccgaattttagtgcagttcctaataatatttaaacacatggtattgcagttacctctcattttacacaaacattcaactacatgttttataacgttatcactagtaagagagttctttaacacatttacatattcaccctaacaaagtatgtttaatcaatcaaataccctcatgtaccttcctattgcatctcttgtactcgctgaagctacgttaaacaccaatcctatagatgttatttaccaattcttataattaagtaactcaatagtagagattgtttgtgtacctgcaagtgttgcagcgcgactaaaacggtcagttggaagtttgttttctttcattttcctggctaagagctgattttacgaataactaaggtacctgcccgtgtgctataatatttttggccataatttactgtattaaaattaaattttagtgtggagtaatttgattttgattgtcggtttggggagcctttattggaggttcgtgccttgtccaaactaaccaacttactctccacatcgtaattggaggcatccatatcctctgaggttgtggacttgtaatcatctttaaaactatctttggaactggtaggctttaaaagagttgtgacaaattgcgggagtgagttcaaataaaagggaaggattgaatttaggtaaactggaagcgaatttaaatcatctaatggcctagagttaacatgctggtcgaattttctctccaaatagtctaggttatgttttctatacaaactcagctgagagattagtttatttctggatgaggccataatatattaaatatattctaattataaatccccattggcaagaacattgtgaattttccactaaattttcttttatacttttaactttctaacgttttaaatttattataatatttaatgtgcataagatatttataaataatatctttatcatgattatcttatgaatatagtattcacacttgtatttgttcttgccacaaacctatgtaaaagctggattcttcacaacccgttaattttaaataactattattttaacaccaaaggtagttaagacttattattcatttttacccaggcattgggccattgtatgccaaaaagaaggttggtcgagtgctggtaactctcgaatgtagcatatcacgcaagcttggagttcctccttcaagatattatacaactaagaataaagtcaacacacctcagaggcttgaactcatgaaatataacaaatacttaaggaaacacacacttcacaaagaaatacgttaatttcaactaattttttatatttattaatttacattaatttttataattagtcaatttatttttctgcttattaaattcatttctcattttttagggtaacactataccggttcttcatcattaccagtaaagttacagaatattatttaaaaaacatttacgttaaattattagaagtacaagcactaaatatgtcagacgaatcctttgatttggctgttaagtacgtcacagatacaacgagtatgacggcaactgacgaacagaagctactgttttacaaatactttaaacaggccactgttggagactgtaatacctcaaagcccggaatgatggattttaaaggcaaggcaaagtgggaaagctggaattccgcgaagggcatgagtaaggaagatgcaaagaaggcttatgtcgatttattgggacaactacaaccaaattggaaatcttaataattaaattgaaatatttaaatccaaacctttcaattaatttattagtatacatttattttaaacttatttaataaagttcaaatcctctttacacatttacatatattatactttaatcgtaaaacagattatatgtgaacttaagttaaataataaatgtcaatagatggtctagaattaacaggagtcacgttgtctattaaggtacatggatatggaatgaataatggtgggacaaaatacactataaaattgaatttatttaaatttaatttattttataattttttgtaaaatttaatgttaataattaatgaaattgtccaaagattatatgtaggttgggtaccatgagtctgcacctccgcaacatgttgagaggattccaagtttaaacatgaaaattcctttaaaataccactaaaattacacacaaaaaacagatataactcagagaaattaattttattttattttctctaaaaaccttcctattaagggtgatctcaatattatgcctgtgccttttcatctgtacttacttggtattcactaaaataattgatgatcattctattttatttgttttattgatctgtttccaaccttttaattaaataatcagaaatttgatcattttactgttaatacttatttaattagtcattttatatctttttcgagaaaagtgctaaatttattatttgaatagactataaagctctgaaacagtatttaaagtttttttaaaaaatccaaagattattttaaattaaaggttattttgtacttgtttaagtgtgtatcgatttaaaatttttgaaatcaaaatcgttcaataattttgtacaagatagaaattctaaaaccacatgaattttttatcatattttgtttaaatagaaatattttctggaatattaatccggccccgtgcttctactggttacttaaaaattttcatttcatcgacatttacgccagataatttttgtaatcaaaggaaatagattaattatcaccattgttttttgttttcagtgtttttttaaaattttttgtgtaatgaataaaattatttgtacggttgttggaatatatagtgtttattcatgaatatgtgttttataaattattaaataatctcgataatattttgattttataccaagtgttgttaatatttgttaaaaatgtatcaatcttattattatttctttcgtctaatgtaatacgacccaaattgtttgttgagtgtaattgtacattttctaattcatgtatcagacaaaaagaattgtaatataaaagactacactttccctaaaattttagcttttgttgtttaaaatgaataatgatacaacggtggactactcaagcgggtataaaaacctcgaaaattcagtagagaacggcgcacattctcttaaagagaatactaacgtgaatgatgtagatactctcttgagttgcataaacttatggcagaaggagaataaagaaaattcaaagcttcagaagctggatactttcaggaacataccaacaattccgttcaattctacaaactctttgttgaaacatgatattaataaaataaatgggtctattaatgaagggtttatgaatttgcttgcattaaaacctgacttagaagaagggaagattgcggaagaggacttgtataagcactcatccggtttatacaccaacacattactcaattttgaccataagagtataatttctaatttaaattatcccattgattattattatgataaattggagcttgcaggcgaaaacgccagagataacgccagtaccaatgaaaattccagcgacggcacaatggggaatgagcaatcggagtttacatcgagattgagaactcaaactcagaatccaaataacccaaaactgtcagaaaactgtgaatttagtaatgctaatcaatttaaaagcgttgctgctaccgaaagtgtcaaaagcaacccgaaacatgtagagtataacagtattaatacaaatagtaatacaaattatgtaaattataagtctgcaaactatgaaaataatagtttgcaagaccaagcaaatgtagatgataattatattgacgaatttaaaggaatgattggaaagttcattaatggtgaaaactaccatgcttccaatcacttaacgaatgtaccaaacagaggctttcaacacgataacatattaacaagtgataacgttctgattgatagagactttgatgaggatttggagaatgaagagaatccaatattgtcaatgtggaacagacaagatgcgataataactgagagggacatacttgtatacggcaaaagcgattccaatttggagctgctaaccaattcttcaaacgataacaagactccccaaaataatatggacatgatcaaagatgtaagtgtcaactgccaaatcgaccagatactgaacatcaaggaggaacctgagccagagaagataagaggagtgtgcttttgtaagagcgacaacagttggaccgcctggtggactgagaagggcaaaagcaggaaaaaggcctttaaacttagtctctacggttatgaagaagccagaaaaaaggcaattgaacacagattatacattgaggaaatattgcctgaactaaaggagaagaaatttaaaaccgccaaaaggaaggccagcaccatgagtacaccaactacctccatcaactcagtgagtacaacaaacgtaacaccgagaaccgacaaggatgaagcacctgcaaaggaggaaggaatattcaggggcacaagaaataggtcgagagaaaagaatgaagagaacggagtgtacttcaaggataacgtctggtatgccacttggattgatccgtttggattaagaaaagtcaacgcgttccctgtaaccaaggaggtacctttccttgcagcaaggaataaggccattagtgcctacaatatgaacaactttgttacaaatgctaaaaataatccccaaaatacttacgtacaaagtaacctcaaccaccaaaatttcatcacccccaataaccacttcaataactctgatagagttaatagtccaaccttaaataccatgaataatggcaccgacaggcctaataattacaatggcttgaatagcaacttgatttacgagatgtcgaaaaggagaaaggtgaacatggacagttcagtgggctcaaaaaccgatggttgtgaatatttcaagaacatggagaagaaaattgatggtgacttggaaaggggcaaagcaagagcaactcaatactctggaacggaaaatgagcctgcgacatcaactcaaacgagtcagaatccccaaatatttctccaaaacgttcaagaatatagattaccagagtcagagaatgtacaacaacccccggggacaaacaaaagagccgaagctaagttaaactcacaccactgccaaatcaagttggaaaggtcaatacttgatgaaatcgaaaaggctattaacaaatcactggcccagaattcaaatcaaccttctgaaagccaaaaaattaatggaaatggaaatgggtcaagtgagaataacatagagaaagttaacgaggaggttcagtctccagataaccaccgccaagaaggtgacgagacgctcacaaatgatcaggaagaaaaatcagggaagttttttgaaaatgtaaatgcactttgcatctcacacgccggcttggataaacagttctcagttagcattattccaacttacatccaaggaccacatcaaacacaacttctaacttttgtcattttaaattcataactttaatatattatgcttttattttacataaaatacacaatgtatatttgtttcattaaatagaatggaattttaattacacattaaataaaagttgaaggttgattcagtgtgaacgtgcaaactagctccataaagtaccataaatttataaaatatcttattaaaagaaatattcatggataaagaaacgagtattaagcgagtttgtgtattaggagtgtgtttttaaggaaaaagtggaggaagaataggaaaaaacgggggaaactgggaatgctaaagtaaggtatatggtgttacaaataccgaaaaatgggtgaattttaactaaaaggaggggagaaaagataacaactcattttaaaacagaataggatgttatatgtgtttaaactaaggcagttcagctctccaatagaggcggtagaatctccaacggaaacaggtgtgtgtgaatggggtgaaagaagaattatgtgatttacaaaaggaaaaagaataagaatactatgaaataacaagagaattacctcaaaattaaaattcctttgactttaaaaataaataataaaagttttataatggaaatgatctattctttggtattcaatagtattaaaacatatactaatttatcagtgtgcaagtatgattctggttgatagtccaagattcctttttatatccgttaaagttttctattcgaaagaatatagttaaatatttgtattctgtcccatcatttagggtacttttaccatataggaagaatagaattttaaattgaatgcattagaagttttccatcccacactaatagtgatatctaaatttaaaataaaagtataattttctcgttttaagcaatattttcatgattcagtgaaataacttttgtatggttgggaccaagtattatattcaacaattcgtctgttaaacataaaaacggtattaaaatagcacagaaattacctactgataggtagaatagataaaaaatactattatctcgagtttatatgggtccttttgaaattcggggaaaatgtgttgaccaggaaaggtattcgtgcataaaaattttagtttaactgtaaatatatacaaccgtttggcgtgtgaaaagacacgaatgtagcactcatactggaagaataaattgaagaattatgaattatgacagtatatatgatatttttctgttgaaagtaagtttgtgagatttttatgaatgaacagttacaggactgggggtcattcataaatcaaattaacgtaagatctaataatcaaatcagaacagtgtctaggttaagaaattattcaatacgaattctaagcaaataaccataacaaattaagatccaccatttcctatatccacacattgtgatctcattattacaatgacgattcatttattttaattctgcattatttgagtgatcgatgctttttaatttttcaaaatatttaaattatgtttcattgattcattttaatattttccttatttaaactagaatatttcactccattttgaaaaatattgaactaaaatgtctaataatgtttttcataacaagtattgctccttcggtacctaaaactgtccttagatcggccaaataccccgtttgcactgtacaattaatactttacatagacacgttattacaataacgtttaatttttgttttcatttatatttttaatcaaaattttaatcggaagacttggatttcttacacatcattaaatttttatatttttaaagaaaaaatcggtcgatttttcaagaaccaaaatggctctgatagagaagccaaaatcaccattgttgcagtcaagtctcgataatatttcaatttcgcaaagacctttactgtctttttcctcagaaaccagtaaaaatgtggattccaacctaatatacactacatccggtagtaggagaagtttaaggaaaattaagaaaccaaacttttttaaaataacacatgaccatagacctgatccagaacttcaagcagcgttgaagagaagtaaattagtaagtttaatataaaaacacatttaaccaataacttgttcaggacacctccaatcaagacattgactattcttccatcacccccgtcccagttgtgtatgccacgaaggaggaattttcaaatcccatcaaactctggaataaatatagcagtttaggtaaataaaattaattaatttggtaatttatcgcttaggagaggaatttggagccattaaggtgatcccacccgaggactacaccaccagactgcccatcgaccttgagaactttcgcttcaaagttcgccaacaacgtatacaactgctttctaacggaacggtattatttatcttatacaaatgagggttatttgactgatgtgtaggggttttctcatccttctgacctgtggaactgcgataagatgataaagtatgacaattttctcaagaaacagattatgggctctgacgatccctcactcgagtcagtggagaaggaatactggacgatggttagaaacgctgatccaagaggtaaataagagtatttcaagtgtgtgtagtgacatctttctacggagccgacctgaatgtcttttctcacaagactaatacgagagataatttattaattaagtgtgcgacgaatgatccctggaatctttgtaatttgcccaactgtgatgggtcactgcttaagtatatcaacaacgtcgtgccgggcgttaacagcccctggctgtatataggtaaggtacccccgaagacacattttttaaggcatgattttcacctcattttgctggcacacagaagataattacttcggttccgtaaatttccatcacagtggtgccccgaaggtatggtacctcgtgcctcccaaaaaggcatcaaaaatggagtcagttttaaaaaactactcgtcactcgagggagaagaatttgctttatatgggttgagggttcaaatcccgccagatgttcttatctccaatggaatcacactttacagactagttcaacaggttaacgagtttgtaatggtttggcccagaacttttcattgcggatttaatgcagggtattgtagtactcagattgactaagtcaatattgttatacacctagttctctagagtaatcataactgtaggtttaactgtaatgaagcatgtaatatagcaccaggaaactggattaagatgggatataagtcactagtaaactacaaatatgctaggaagacctgtatacctttctttagaatcattctttcatcaattcccaagtacccttgctacacccctaagctattcctcctatctataaaacaatacttgagataatttttgattagtgtaatggaacttgatgcaacgcatataaagagtatagttgagtgtttgagtttgttaatatctgaaggtagtttttcatttattaatgattttgtagagttccagctgaggtcgagactaaattatccaaagtatcagatgtttttcgaccgtgaagttgttagaaatctgaaagatttaactaattatctttcgcacattgatcgatcaggttctaaacactatttattcgcatcatttccagttgccaattcttatatataactcataatgatggctcagattttgacctggagttgttcatagaatcaatgcataactccgatacgacaaataactaccagttccttgtatcctgtaaagagatggcaagcttttgtatcaaagattgtgatttgtgtgacactcccacctttggaagtaggttccttggtttaaacgatttttaggttccgttttgtgtaaccacattaacactgtggtttgtatctcctgtttaaactatcacgaatgtgactgcaaaacaagggttgttctttacagatacccactatacacgctgtacaatataatattaatactgaaaaaagtttactactctatggtaggtttatacatttactataaattagattttagtaaaattcctatatattagttttttataaattacctacaaattaattttttaataaatttcccaaaattgttttttagaccaacgagaacttgaaggtagactctgagtatgacatacctaaggaagacttgctgattaagctagactcgagctcttcctttgccttcaaggacttcaaaagaaccaatcactctgaggctcctgcccacgagaatctcaagtacaaatgtaacaagatcggcctcatcaggcagaactttgaagatataacgcaaatttgtaggaagcttacaaattccaggctaaaggggaggaagaagaagctggataaaattgtgattaatgatgactttatcaaacattccgaagtatcaggttcgtccgaagcccttgcctacgtaaccaagttgagcctgaaatacactattctggccctagaggaagatacaagggaaagccaagcttaaaaatgaaaaattatatataaattgagggaattcatttaccgaatacaaattaaagaggaaattaattaaaatattagaatggatttccgaacggaaatgtggaagctaaattaatatttaatggatgtatatttatgtacttactatcgttgtattttctcggtcttcccatcctgttggtgttcttgtcttgtttattcactgaaaattgttaagagttggaaacatacatctgttgaaggggtataccaaatcgtcagtttcgttagttacgaacttaaattcccgggaaagagtgcgatagttgtggaaacaattagaggcgaaaatagctggaagttgcggaacatccagaagtaaagtaagattagcaaatgaaagcctaagaaaaattggaatcatgtgaaagataccctggagctgtggacatttagaaaataataacaaataaaaatatatgttaaactggttatgtaaacatttaacgaagtaattagagttatttaaattatctagtagaataaataggaagttaaatcatgggggtttatactcaacgtatacagttgtatgtttgtacacattgaaatatattaaacataaaacatgaaacaagcagtgattaattttaaaacaatatttatctaattatatttgaactgttaccaatgaaaacgaactagatctatctaaatttataacaccctgattctacactaaatttgtcgtaaaattctaaaaaattttaagcattaaaagttaatatggatgtttgtgtggtgtatcactgaataatgagtgaaatccactttttttggctaaaaaatgattttgagtgtgtataccaccactactatgtgactggaaataattataactagtgatgatttgataatatttataaatcggtgtttaaatggttttgaaataatgttgatctagagagaaattggtggatatatttggaaaaccgaaaccattaaatgtgtaaaaaaattaatgtgttcttatatatttgaaacaaatgtatcagaatgataaaaatagttaatttttaatcttttggagatctaatttaaatttagttgttaataatcggcagtagaatctatggaatcccccacagataaatatagttaaattttgacgatatttgatacattttgttgtattttatattaattttcaaaataaaatttcaataaaatttgttatatacccaaataactgtaaaatttactctgattcttgttattttgtaccaatacctctataatttgttattttaccttggttcatttgtaaaaaattattttgttacatttaaactaaaaacaaattttcaaatcacaacgccagcagttttttaaatttgaatcaatatgcttcatctatagattaaacatactgaacattttataaaaagttttactctaaatcaccttcggtatatgatattgtatatcatattggatttctcataatttttcatttccctttttctaactagccgtattttatcttagcatatgccaggaaataaccgggcatatgctaaggtaataatattgttatcctttaacagagccttgtcctgacttttatttcatttggataatcgcacaagtacctatttcatcggatgtacaacaaaagttgatttaatataaacagtaatatagatagtataaagatggagtcgtcatttatcacagttctcgaaagtagtttggatccagagtccaaatactttatggaagctcagagaaaactacaattggctaaagagtcgaaccttccagaattcataaacgctttgtcagaagttattgcaaaccatgaagctggatcaggaccgaggtacctggcaggtatactgctaaagaactgttttgagttcaagactgaggaggaaaagatgaatttctacaagaatacaagtgcagatgttctgtactacctgaaggttcgtatgataaatgttatgaaaacgggcgcagagtctcaggcagtactggcagcctgcacagttgtggcacgaatcgctcagatagaactcagtaccaagtcgtggcctgaattctttgacatcatactcacgatggtcgactctaacgatttcaaccagactaggagctcactgatctgcctgagttatctcattgaggatttatcaaacatttatgaaaaccagaacgtcaacttgctaagtgaccttgaggttaaccgacttttaacgtctgtgatcaagggcgtttatatagaggatccacagtcatgcaaaatggcattaaggtctctgcaaaatctgttgttctttatagagaacaacatggaggttgacgcagaacgagatgttattgtggaggctatttgtaggaggtgctctgaaaacaatgaccttgagataagaactgcagcatttgattgtttagttcaactagtatcagaatactattccaggcttattccgtcactgcaagtcattgtaccgttcctttggcaggctatagattcgcatgttgaacagattgcaataccggcatttgagttctggaacaccatttgtgaaattgaaattcaaagcgccgcaaacgctactgataggaccagctcaacagtaaggagtgaatctaccggtaaaagtaatagagatgcagtggaaggatctataataaagcaggtcatcccatacttgttacccaagatattgtttacaatgacactgcataagtttgaggatatggatgttgatacatggacactaccgatggcggctgggatatgcctttcattatgttctcagaccgtaaagaatgacattgttcactcagttctagagtttgtgacggagaattttaaaagcactgagtggaataagagggaggcagcagtactggcttatgggtacataatggagggtcccgatagtgaaactttgaaaattctagtttccgagtcgtttgataatctgtgtgatgtactgtcagatacatcaatagcagtcagagacacagcagcctggacaattggcagaatagcaacatttcactgcgaagtcgttctgaaccacttgggatccccagatgttcccaactcaaatttatcaaagatcgtcagagcactatttgatgtaccaagagtcgcagtcaatatctgctattttataaatgagctcgcagaacatattaatggtatgttcaaatttatgtatatctatatatttatataaaattatataaaaataatccgctacatacccctaatcaatatttaaaatatggccttaaataatgtctagactacaataaagggcctacaaatctactggattgtatgttcgcaagactgtgtgaaatgttggtaaatcggagcacaatggctgataccttggatcgcaatttatatgtatcaatatacagcagtttgtgtgcactgattgctggagtgtcaaacaactgtttgactgagcttatggcactattggaccactttgtggtattagtgtctcaaatgataacatccgattttagttatgagcagaaacttaaaatacagtcagttttgggagcaatccaggttttagtatcaagggtcgggtttgtcaagaaccttaacctgctcatgaacagcatatttgaatttttatcagttgagttggatgaggaggcactactgaccctgagtgctctggtgaatgtgattgagtttgcgcagattttacctttcattcccaagattgttgacgtagttttaacgggactgcagtcagaagttggaatatgtaagattagtataggtttgacgagcgacgtgagtaggtgtttggaatcaccgttttccacctatctcgacagattcatgacgattttgattaatattttgcaagatgtaaatggagataagactttgaaacctctgatcattgtagcaattggagatatcgcgatggcagtgggaggaacattctccagttacgtccagaatactatgacactgttgctccaagcagccacaaccacctatgaaatgggtccaattgataacgaggattggatttacttcgtgaatcagcttcaggagtcctctcttcagtgctttacaggcattgtgtacgggcttaaggaaggtggagctcttcatttgctacgaccctacgtcagctcactgcttcaatttgcacaacaggttgttgagactccagaccctttcttcgataccaatttatataaacttgctgtctcgctcatcgggtatttcctaattcacatagttatatattctcatttatatattttatatatactaatttacgtttagtgatttatcgtcatcatttgggagtgacttatcccgtcacttggtagactcaaatttaatcagaggaattgaaagtaggctaaaacaactggagctcgctcaagacccggggataaaggattgcagagatcgagtagggtggctgcactctactctggctattaactgatccatgccgtagttaatgttgtaaacttaaacatatattgtataatttacattcacattactgagtatagtacattttagggtccaggaggtcatcgagtttcatgacctctaggaacttgactcccatgtcatcaagtttcttagcaaattctaaataaaatgtttagaaatattgaattgtgacttaccgccgtagttaggctcccgattgagtagaattaggacacaaacaactttggcaggtgtgtttttgaggagagaaagactctcggaaactgaagtacccttggtcaaaatatcatctacaacaactagtcttgaattttctccaaacaccttaggtgagcctacgaaaagtttaccttcgccgtgatctttaacttctttccggtgatatccaaagtacaccttcttgccagttaatttgtagtactttaaacatagtgttgaaacaagagggatagcctgaaacatacatgaacttggttcaaataggtataaaccttgtatgggcagccgtgaaaggcgtcaaattctacgttggattccagcaacttcgcgatcattaaatcagtcattaaatcgaaagattcgcagtctgtaagaactccagagttgaagaatatattggatttgagtccagatctaagaacaaagtctccgtatttataagcttcatatttgtggcacagttcaaggaagcgttttttcatctcaggaaccctcagaagaagagattctgaacccattttcagaaccttacagcgttaaatttgtcaaaatttcaggttttacataagaaataagcgtaaataaatgaaaactttagttactatggggaattaggaacattgtttatagaattccattaggggcctaatacttacacatttttatataaattattttttattaatttttttaaatttaaattataattatgataaaatgattttattatgttggtatttgacctaaatttatgcttatgaatgttgtgattcctgaacatggatatttcagataaccatgagttcccttcactggatgaaactctgttggataaaatccatggttttatctatccctctgagcgttatttgtttaatctcagtaatttagatgaagaaagtgaatttttggaggaattaacgaaaaatgattttaaaattcatctaataaacaaggaatttgaactaagtaaaggtaaattgggctctttttataaaaggatcgagtcgttgagctttttgaactcttctctggataagtttctgactgaaagcaatgagagtcgttatggtaaatttatggatacaacattttacaccaatttctcaaatgaattcgaaaaaactgtgtctgagaatcttccgaaaatgcggaaatatttcaatgagtataaaaattcaacattacaaaattatacgaaaatattgacaggatataaacgtttgaacagtcttaagggatatgtttcatttttacaacattttgaagaaatgcacataattagtgaatattcaaagaaagtttatgttccagttatttatcggatattgtcttgtgtttgggggattaacaaagctaaaaaggtgtctgaaagtgatccaagagttcttgaaacgttctttttcaactttttgagggatcagttttctaggaacactgataaaattttaacaaatatttttgttaagaatcaatatagctatgacccttgtgacaaactcttgatattgcttatacttggtcagagtagcgaaaaatcgtgcggttatgtaatcaaatttttaaaaaacgagctcctctctatcacttcattaactattcaaaagtatttgaaattagaagatgatataaataagatgaatagaaatgggtttaggaagaatgatgtttcaacccaggcaagcctaatttgtccgaacctatatctggtagtgatttgtaagatattatctgagtatatgtcattttttcaaaatttgacttctaacctaaattatgaatcaaaaatcatgagaccaagcagctctaaaggagtaaacacacatataagcagattaaatgttttgttaaaatcttttgataaggttgattattatttgtattataggaaatctctggacttgttcgttagtaaactaagtttactgggtgattatacatttgaaattttatctaaagttctatcgagttttaattttaactcaattcatgaaagtaatgacgttttgaagattttattgctaattttatactataaagttttacaaacagatttaaaagtctccacaaataaaatggaagatgcgtcaatgtataaacatgttggattagattctgagctgtctgagatacttgatgaattttgcacaaaaaatctggcatttgctaaagaatatggatgtaaagactctgcgagtggttttgaagagttggaaagggttatttctactattgtttctgattattctggaaaattgacttctgaatcattggataatatctcaatttctctagctaatgataagttggagagaattgtaatcgacccattcaaattaaaaaactttaaaatggactatttttgtaaaatattcaagagttttataaataatgggaatttcatcagttttggcaattttaaattcacttctcagaacccttatttgggttggactccaaatttaaactttgcaacagttaacatttctcaattaaacaatttatcaggttattttcctggcgatgaaaataaacctaggctatttaagaattatggcggagtttatacagttacctctaaagttttgttaacttcatatgagaagtacttaaaactgttgtttttaaaccaaagaagttgtttggatatagcagtgaatttaactagggttatggatgaatttattcgtaaaaatgtgtattcatgtgggttggatcattgtgtaattgaaaatcttaagaaatttaataaggtgctgaactctactggggaaatgactgaaaggttaaacaggagtagtgtctgtgatacattcaggcaagagaattctgaaccttacgggatttctagttcatccagaacactttcagaatcaactaaaagcccatcggatttgactagattatcacaagttgtgaattcagttgaatcttcttataccatattggaatcattgattccacttattagtcaaaacagcgataaattccctgaattttgtaaatatctaactgaatattataatgaaaggaacgaagttatttctgagctcagggtaatgttataccatatatcaatgtacaatcttctgaggcccaaaatacccagtataaagttattacaagccttaacggacaatgtacctttacacactgacttgcgtaaaacgtttggagattttaacaatcatttaatgtgtttaaaggaatttatagaatccgctgattcagggtcatttccgataatggtacgtgtatttatatgggattccgtaataaacgttataaaagattcctttaagccaatttttaatttgttaaataattgttcaaattcagacttggaaaaggctataactggtaaatattctgaaaatctcaaattatcgaccttgattcgtgccaggtacgtggaccagatcataactgactataatgagcatagggatgaaattgcaagtatgagcacttattatagtcttgtaaataaattaattagtggtttaaaatgagaataaaaatccttaaatcttcgcattaatgtgctaaaaatcctctttcatttctcttattccccatatgtgttaatgttactcatttttaaccatttagctataatcaatctttatttcacttgaatttatctttaactatgactgcaactgaaggacttgagcctgaagtttaccagagtcccttgcataaaaatgacttggtgaatgagaccctggaagagctcagaaaacaaaagttacaatcaaatgacactactgagtttgacctaaagccagttgtagatctttttaccaggattaacgaggtatttcacaaatgtgtaaataaattacttacaattgctctttaggaggtggcactgaaccaacccaaaaacgtagttgagtttgtgattgattttctttgtaaaaattaccctaatcatttacatggatttagtaatatctggaactctggtattgctctaatcagcttcataaatagtctacacattctcaacaattacataatttatatttatatctacatttatttacaaaagtgtatatttattttagatcccgaattggagcagagcagattagtagttgttgagtttttcaaatataatagattaccagttgaaattgcctctcactttactcgtgccggttatgacaccttggacactatagcatctctgaacagggaatctttgggtgaaattgagagatattcaaatgctgaatggcttccgggtcacaaggtccgtttaatgaagatgttcgagaacgttgaagaatacatttccgagtttaagcgtgaaagaccttttcagcacctccacaaatcgggatagatagcagtgtaacatatttcaatatttttaatagtattttacaaaagtacttttaaacagttgatcatttcttcctttacgtataggtgtattttatttcctgttactactgcagccatggttatatattcttggccttcatactctcgggcaaccactttatcattcatcactgcaactattaggagtggtccgttttttagattccctgaatcatctgtacttccaattgttatcaaattcccccctttaacatgttctattaccttttcacatggcatagatccttgtaaaagctcctttaaaaatactaaatttgaaaccagcttccttttactaaaatatttatgcataagttttgttccttcttgtgttactctaaattcacagtcccaattctcttttgtatcaagtttcgtaaatattctgcttccaaaagatgcgtacttacagggttctagtttacttattttattccttttgaaagccttgaagtcgtctgacactagatgtattgtcttttcgcttgtgacctttactagaaaattcaaattttctgtaattccataaaattccactaatctatctcgttctggtccttcaaatgttgtgtattcatgtaatagctttgaacctctcgttttcttcctatctttcttctcttcttccaccacaattccggtttcaagttcatggttatttaattctaaattatgttatttgaggataaattgatcttaaataactgtttaatatttacctttggggattttcctgattttgaatatgaaaaaacctcccgtattgttatagtgtggtaacactctcattacttttttggccatttcctcattccatttactatttttgaacattgtctcctttactcgttccctcatattatcatccacttgtgagaaatcagaaaaataccccccatttggattaggaaccaaccagtctaacaatcccttttctgatttaaaaccttttattggttcaagatcaatcaactccacatcctcaagagatgcacaataactggcaatggcctacatatgaaatattaatttaattatatattgtttattttactattaaatttatgtaaagtttaaattacctcattttccaatgggtttaaggaacatgttgagtatattaatatccctccaggtttcaaaagctaaattatcgttaaataaaattcatttaaaattttaaaaattgttaaattacctctattcctctttttagtattgttagctggactttgtgtaggtgtaatccatttgtggccttccaactagtccaaatatctattgactttctcatggttccatcacagctgcatggcatatctgccaatattttgtcgaataatatcaattggccgttcttattgtacaaatttgggaaccttgttgctaataattaatgtaattttgtatcatatttgtgttataattaaaattttaccatcgtagtttgtgattgcagttgagggtgaatctatggtcttaaggtgatgtgctagtgttgaaactctggtttgactaacatcatttccaactattatccctaaattatttatttaagatcagttattggatttacctttgtttttcaggctatctaagttttgcgattttaatctcgtctcgaccatgtcaactatttgtaagtatttcattcctaaaataataaacaataatctcaaatacctggagctgcacagaaatccaaaatgttttcatttggccttgggtccaggaacaaaactgggagcatgctcactgtttcctgtctacacagtgagcctctgttatcttcattcattaagaactggtgaaattgagcgaatttttcattttttctaagtgatgatttactagttttcatttgatagaatatattataatctacttcatttttaaggtattctaaacaatagtctacacagggttctagatgtaaatcttcagtgtcacacatttgttttaacttttctctggtaagcgtccacaaataactacttgtatttagtctgaatgaaactggaagtgggattcttgagtattcctcgaatgtttcccattcatcttctttacaaatattctgatctttataatatgtttcaaattccttgttaaataaggtgccttctacgaatcttgtcctcccattttctctttgatttgagttctgagacttctttccccaacgagcaccttgcatttctctgcatcttgatttccagctcaatctagtgctcttctgtccttttgtgtcatggttttgaacagagccttctaagtgattaagattctccgacatttgtacttgcgaactaaagtatttccactacattacattaaaactaataaaaataatttacaaaaataaagttatatataaattaacataaataatacaaaatttaatgaaaacttgaaccaaccagttgggtatatcaccttgtgttacttaatatactttaccgaaatggtgattattttataattttaaaagccgtattttaatatgcctcgggacgactttagaggcaagaattttgactctcctcaccgatggagggatgattcctacagtcgaagcaataataaatttaagagaaagctaaatattcctgaaggtgaccgttccaggagacctgttcctcctttcccaatgcctttacctgattttagtggattagttccacctaaggacggaaatatgcctgttcttcttcctgggatgcaactccctcctcctattttaatgaatatgcctcttcctccacctggtatttttacacagctttacacagctttatttacattcattattgatatatttattatataattttacttagattctgaccctgaggagataaagaaggctttgaagcttataatgtccaacttccctggatttcctaaagatgctaagcttcctttccctcctgttcctaggcaagctccgtatcgcaagaagaaaaggcgtgatatacgtatgttttttttctattaaaatctttttagctgttgaacgtgctccacctactgctgaggacctctatgaacttgagattgataagaaactggctgaggctgaaagactccaggaatcacccgtttcaatgtttcttaaggttcctggtcttcttagcaaacgacaccttaaaggctcaacaagtacgtcataaatactaattaactttataaaatataatttagttgatcaaattgaaagggctgctgatcgcagaaaattaaaggtaaggtacttggagcactttgaccagtttaagagtgatagagaaaaggctcattccgaccttattgagagggtttacaaggaatacaagtctctgggtttaggaaagattgaaggcgttctgcccctcctggatggccttgattagtttaattttcatctcttctatgcttgtatattctggcattttaagataatttgtgcaagtcattacacttggtaactcgtctgcattccccttcttaactactctcatcaatggcctataaatttgttatccatgtgcatatattataaataaaatctaagacttacactagtgatttgaatccctcccttggcagtaaaggtgatcctgttgtaaactttagaaagagtcttctcttatcgtcgtcaaagttgtgcaaaatcgttatcagatcattgtaaactttactattagtgtcatacccgtggtcaggaactatgtaattcttcaagtgttccatggtccaaaacttcgactggttcttcttgttgccaaaaatcacctcactaagctccgaatccgtaaagaaccatagactgtacagcgggagaacacaactgaatccatatcgaaaggcccaaatctacaaattgcattaaactataaatctaggaaagtagtacctgtagtttgattccttctaatagcttaaaatctacaattagtcgcacatattcgtcaacattttctctattaacaaacacgttagagcctcctttgagtaattcataccctataatattattacaatttttgtcaaaaaggttaatttgtcaaatattaaaattttagattgtgttaaatactaaataagtagagtatgttgaatgttaattttgttaaatagaaatatacctttaaattcgtgtaccaggtgtagttggcttggatcgggatggtctttaatttgttgtaatgagtttgccaactctgggtctattttcgctagtgtttccagtgtcaaattctgtggtttgtttgggaacttaacgagatcccagaagagtggatggaaaaacaagtcaaacatcttgtcgtccagcatcacgtaggcgcacaccttacccaagaaggaaaataatctaaacagcagtagtggaagattaccatcatttgaaccatcaagtggtgtaaatggttctgaaacaaaagattcagactcttgagatttcgataggtactttgtaaatgagtccatatccaatgagtctgtgctgtgtggtgttgggaagtaatatccatcaatacattccaggagttttggtttctggaactttgcaaattcttcagaaattagggtaaaaaactccaatgttggtcctgaccctattcccacctcatttttatactcgatttcaagttttgggttattttgtacctgttcaaatgtgagcatggcgtcttctaacaagttttccctgtctactgaaatcttcatctttggtatctttacgtcttcgtctatgaatcggaccctgttattcgacacgtactcaaagaggtaatcatcaaatggctcagttattccatcatgtgatagatttctcagcttgttgtgaaagtgggataggtttctatttagcccaacggtgttcatcctaaacagaattgttctagacctaagcgagaatattgatgggcatgataatgcgcattgaacccagtattcacatccaaagcacaaacttctactcaaatcactacatgctgataacaacttcattgttaatggtgaacttactaccagtcctactccactctgatcatcttgtgttccactaattgacccattaaactctgttttatcaccatttaactgttcaatttgtgaattatctgagactaaaactcctaaatcagattctggattcagtttatttgttaaattttcaaaaattgacaatgttctcagcagaaccttcttatcgtatgggaacttgcctagaaaaatcgggaatgcacaatccagtaagaaatccctaaaatcgttgtcttcacccattataaagcttattctgtcctggtcaaactctgccaacttgattaagtacttaagatgatcggttttagtctcgtccaacactgtttcacttgacagttttgtgtaaattatcgggtttgaaagtcccaaattatatgggctgctgctatcattcgtcatagactcatcaactgaaacattatttttatattccagttctctctgtttacacaaactgtttaggtattcagttgttgactttgtatacaggtcatccattttattattcctttcataaatgtccattagtctttctgcttctagataatttgtatccacttctgtactttcattgttgtactcttcggctcttgctgtgtttgccattgtgctatcgtcctttagcatattttcttgttcattcaacttgaactcctcttcagcaccattaaatttattaacttcatccaaacttgtgactgtattcaccttatcaatattcataaattcgttgaaatcttccattagtgaatcgaaattatacttgtttcccttgtacaaagtgtatactctcaagccttgttccgaaaattttacgttattgccatttaaactactttcattttttgtttcttcagttagtttcggggtattttggctatccactgacgttgactggtctggatttaaagtgtatgtatacttaaggagatgggtatgtgctactatttgtcttcttttctttgggctgaaccctccaaatcgacaaagtgcttcatacattgttacgtttgatcccaggcacactccgttaagaaatataaacacgtccaaaactttactgttaatcttcttctctatgtagcgctttacatagttttccacctttgacagtcttaccaaacatggcacataaactgatattggtaatagtcgatcactatccctttccactgggctctgctgatcactgcccggtttcccttccagcttatctggtgttttactggaatctggtgtacttgtcggtgaaacgttggatttagtgcccaaaaatatgggtctaagcctcaacttaagctctgtgtgtagaatattaaatgggtgtgatgagtatgagctaacatactttttaataacaccgtcaagtcctgttttatactttttatccaaattgccgaatatgtgtattccttcattctgcttgctaaattgatcagctttacacgacttagtcactccatctgactttttagtttgagtatccgtggaattctctgaattatcagctttgcctgtattattctccttagtaactgaattttcatctagctttgttggggcttgttctgaatccagtggtggagtcttcaaactactagaattactaaagttggtattcacattgttcgagttactacttgttggtgtaccttgacttattgggctgtatgaagaattgtacaaatttgggtactggaatatttttaaaaatgccttccatagtatgtgtaggtgtgttgatgtgaaggactggctaaccagcgttgtgataaatttgtgtaatgattcttggttttcgaaaaagtttaggcgtgtgattggtacgtttttcaccagttcgtatggtgtccatacgtcgaaattagttctaatttcaaacaataaatctgagtcatcttgtgttgaatctaagttgtatgaattttgtgtgtttagctcttgatctggttggttattcactatcaagtcaacgatttcacttctgtgatttaggtttaagtaacttaaaccaatgttattagggttatttagtccaagtctagtcaaatattcattgattccatacctttggaaagtcactataacattgtttccaaacatgtttatcagcacttccagtattcccaagagattgttcagtgtgtcttctgagcctaagtcaacctggagcaggcatgtggacacgagttctgttgttttcgacactgatagtgtgctgtgcactatctgggagaacttttcaatcttgtttgataccctcaagatgttgtagattaggccgattaccgatgctttatgcctatcacttgataacaaatagcacaaatcacacaggtcagttattggtaataactcgaaaatgattgaaaagtattgcggattttcacagaagaatgaatctctatcttgttccttaactaaatctttagttttattttcagactcagacaccgttgaatccacatacattgtttcattagattcagtttgatctggtttgtttggctcatctacttgagaatgttgatcaaaatcatccacttcctcataatctttgcttgggttagaaagtatgttattggccaaatgtaggaaagcgtattgtagtgagtcattttggctataacacagcaatttgatgttaaggagctgatcgtacttaaacaactgcttcaccatttctgtagaaatttgaactaggcttgacagtattgacacgtgttccagtattgcgtttctacccatattcggtgaaagtatgagctggagtatcttttcaagaaagttattttctgatagtttggccacaaattctgataccagttcttcgtcttcttccctgatcactattgccaacagttctttccaaattgatattatcacatcaaccaatttcttgttatcattttgtatgaatgttgaaagtgtgttaaggattgggattaggtactctatgaagtaatccttgttatcaactagcctcactacgtttaaaacggagttaaatgatgagatttgtatatctattgggaaaaaatcaatgtactgcagcatgtggtagagcaccgacttcctaaggaggctgagcggtatctcatttgacaatttttcaaagatcagaagtatcctctcagcgaggtctatgtactctaggtcactcagcttgttgcacagtaccgtcaagttattgttcaatgcaaaataacgtgaagtatagggaactatgtccaggattgtgttaagacatgttgctgagaggatcattttattcataaaaacagcgctgtctggctcaaagtactcttcctcgtcaagatccattcccgagtccgagtagttttccttggtatcttctgggagctctttatcatcatcttcgaaaccctgctctgtgaaaaccttatccataagaaacttgtcatccttatatactgaggataggaagtgatagtatggcaattggaggttcacattatcatcttgtgattccgaagttttctcggtattttgtgggtaacgtttggaatattttacatcgggattttccagtatgtggaataacacttttatatatgccattgacggaaatccgagtagatagtcctcgtttgagtaactcaacaaatttgacaactcagttagggaaacaacctaaatgtgaatttaatagttataaatatatttatacctgttctgtgttatttccgttcttcaatattgagaggatagacagccattttccggtgttcaggcccttggctattttcacgggggcttgatcataatcagaataggctatagaatcattagagtcgtccatttttgaggttaaatccagttttaaaaacttaaaatgtactatttttgattaaaatttaaaattgaccatttgtgaaagtttaaaattaaaactaataaatcaaatttacttttaaaatgtaatactatggtttatataaaaaaaatatttttgtataaacgtgggtttaaactacttttaaaataaaatttttgcggttaaatttgagtagtcaataatttgttgtaattccccaggatagaaatttatagtgagtatatttttccaaccactcctttttcagatttaatactcaaatgtacgtatttaattagattttatatttaataatatttcttaatatataatatccctaaatttttttaatttttaattttttgacaccgtcactgtttattgacgttaaacttagataattgattaaattctgcctgaaaaattaaatattatcattttgtttcacaatacactggattttgaacacacatttgtatcatgttaaataatcgtcctcctccttccctcgacacatggattataattgcgagctatgttaggaagtttccctttcaggttccttaataattaaatagtaattgaaataattaaacttatccaatatcttataataattaccattatccgcctattattctatttgttaatataatatctaataaaacaactattaacttgtcatttattttataaatataagaacaggttgcattggtattggttcctttctttctggttctcttaatggcgataagaacaagcgggaggagatgagacggttgtataaaaatcgttaaaagctgttttgattaaattttcaacaattgattctaaaattttaatattttaacactttataaactcagatatagtttatttaaaggaacccttaatattttacctgtagattccttgtaattttgtatgtgattgtgttgatggtttgtggaatattttagaagttacatgtaaatattaagatgataaaatatatcagtttatttaatagaaattggttaaaaatataaaaaatgatgatatttaatatcacaatatttaaagacaaagtgtggctcaagttttgcagtttgtatatagtagaatgaattggacttattttccttgttaaccctgtatattaatggctacctatttgtaaattttataatttcatctatggtttatgataaatataattatatgtacattcaagatggagccactcgaacagttgaaaggccaggattcctacaagtatttgggaggtaaacacctatacttatctaacatttaatttttagttctcgtttctgttacgatgactaccggggatgttttaaagggcgaattatactgcctggatacccacaaggggcaaacattagtaataagtgagtttactaattgttttaatcctataacttagaatctgagggagatgatgagaattttactttccatatattgagattatcatcgattatcaactttgaagttttaggacgtctcaacgacaccgccggcgaactaactcgcatgacctacgacgatttcgctcattttaaatcaatggttagtagaaacggtgaaaacatgaataagaaaaatcattaacctcaatttattattataaaccgctttatacattttatataagtatacagtatatgcacagtggtgtaagtattagtatagtagtatattacatcactttggtttaacagttaagttagtttgatcaacgtgataatgtttccctaagaggttatttgttgcattaactattgttttcttttcactattcctcagtctcctaaagccgaatgccaaaaatactgaaagtgcggtgaacaaaaaacaaattggtacgtaaacgtaggaaagggtcttcagtactggctcagttctaaagggttccagtcccgatacatcctgtgctagggatataattattataatgttgatggcaagagagagaaaagcgttaacaatataggcgacgggcctgccatcagcatgacaaaaacagctttgtatcattaacagagtaacaattatggagagagcaacgttaccgaaaagcaaagccgttagtatatatacaagctggacgcctatcatggctacgtaaagttccctagataaggacaggaacctccgggttcgttcgtcagacgcaaattctggcgccaataataaatcccgacctgcttcgtacaataaattatcttcatccgttttatcctccatagtttgcgattccaactctttaattatatttgaatctttgtttgtattgttaattttgttggtgtttaactcagttgtgtttacaaaatgattatgactattgaatggagagttcgaagtacaataatcaaattctaatggaatagttacattgcaagtgctagatctgccacttctgccaactgaaggaaagacgtaagatctttctctagtaattttgctatcctggtttgaatattgtgacggacttatatcttcccttggataaggtggaattctaaaatcgctccttgagaaaggtgatatatcggagtttggactttgatgtataaaggctgacgaagttgaatgaattgagctcaaatatttattattttggggagaatttatggagccagaataaataagacgaggcgtggacctgttaaagctttgttctaatttgttgttagttgagttgtatttgctacttggtgatttattgaaatcagaatccaatgagtaatcgccctgaatatataaatatgaatctccatcatgttctggcatttttatagtcttagtaataaactaaatgtgtaaaataaattttagttattttagttattttaacattattaataataaatgtataaaataccttataattattgtattctttggtctaactggcgcattaaatcacaaccaggtttgaataaacattgaagcacatttagaaagatgtgtagtattttttacacgtgagagaatttatttgttcaaattttgaaatttttatcaaaattgaatttttgttagttttaattgaaaatcgaagattaaaaattaaaaattgtaaatcaaaaattataaatagacaaacttggtaaattattcaatgtgtagtatatttgtagtaacaattttcataaaaatatgagtaaaactaaaatttaaaatttaattacaaacacgaataaaataagtaagtgatattctcagctgtttgtacccacgtcttttaccttatacaatatcatgctaattttgttctttagttatttgttttattatttttttaattataatattattttttaaatatatttttattttttaagttttatattaaatttgtaaattatcaatgacattcccatgataaataaaaatatgcttaaattgctaaaaataatttttatttaattagattatataatgactggatctggaggcgaattttctatttctgaatttcagaagttatgcgagtatgtatcttcctcggacgaatctggagaattagaacccaatccctcagcttctgagattcccgagcaacttaatttaaatcctactgaatcatcttcatcagatgaggaaattgatgtaaactttaatgacctccaatccctcataacagaatccaaacctaagcctaagcaaaacaatatcaaggacataggtatctttatacttttatatatatttacatggtgtagatgcattatttgctaaaagtaaattaaatttgaaaaaggaaaacgaactaaaaatgaaaaataaacagaaagctgcacagctgatgaggcatttttccaagtataaagataagaaaggtattttacaccctgttgttagtttaacaatatttttagaggaagttgttgaagaagttaccttcaaggaatggcacgtacctttaatggaaattcccactagaggtaattttagtcctaaatttaaatttttagagcaagaaccaaaaccaaagaggaggaagcaaaaggacaatgattgacatgtacaatagaataacgtgaaaatgaattaaacctggggaataaaattagaatgatagagcataacccttatttctaacggccgctaccacttgctccttggtcatttttgtggacaactttgtgctcgttcctactactgctacacaatttacattttcaattgatggatgctcacactcaacctttgaaacctaatcatttttacagttagtgcatatttttgactattcacaactttattttaactattatactagatttcaagtaccttgttatcttcgtagtgtaggtataagtcgcacttgtaaggtaaaagcgagttccatccaggcattagttggaactttgagttgtagtccttggcaagtttcagaaactggcagatgtacgaataaaacttgttcttatcaggctaagaaaaattattagtggatttaaagaataaaaaattagatttaaatgacttactgcaactttgtagcttagaagactccttccaccgtcgtttgtaagcttgaattttgggacagttttggttggaaccatcatcattactgacttctcgacttgctccttggagttctccttccactgcaggtaaaatgacccattgtctacggcctcgtacaccaggtgacagacaggcgcttcgctttccatgagttgaaaattatcaaatcctttagtgggtgttttctttactacgacggtgtgtgtatatgatttgtactttggatcttcaagatcctccttgcttttcattttggcacctgtgaacgcatcatgcgcggagtctagctcatgatctttactcatttctgagcctcccgagttctcgaattttttgctgtattcttttgtaacagattctgccatttcaaacgtgaattctacaaattgtaaaagtcggcaagtgtgcagagagtgtcgttatagaagctaatttttaataatataatggatattttattgtataaaattaatttattaatttacaagtgtggaatggtctgtatttcctctattcataaatgaggattcgagtttatcccataatccggagtgctcatcactacagctgcaaaaccatatgacaaatttgaatttaacgataactaatactatgataatattaattggatagtaataatttaaataaaagtaaattaacttaaattatctataattaaagaataatttagaatatagttagaataaagtatgaataaaaacttacatatccagagggttggattccattgacttttgatatagttgcgaatcggtttcgtttaataatttacatatattgaatgacaatgtgcgaactacggagttccagtgtgtatttgagttttcgttgaggatcggcaccagtgctggatacactgttgctttagacatgttaaacagtctcattatcctttcattattccacatgtagagtgttctttctgcgatttggaagtgtgtgcaggaaaggcaaagtttgagccgttttaggagctggttcagcactaggttaaactctggaagctctgtgagggagagtacctcttcaagctcatttagaaacagaatctccttttgtgtgttagttgatggccagtagtttagtatacatgtgagtattgtggctgatagtgtcctatccttattaatgtactgtatcatgcaatatgtcagtgcggcatggtacgtccttagcgagttaggcttatgtagaggagccagtgcttttctcaaataatgtttatgttcttctttcagcggtattgcaaacccgtttataatacttccaagtatctccaggagctcagttatgccgtagtggacttctgtgtcgtaaacaaagtggatgaacacgttctcaattgcctttctgatgaagttacgaaggggtacaatcttcccgtaaatcctgtgcagaatcgtcttgaggtagtcacgttcacgctgatcctcagagttcagggtggccaacaacttaagtacaaatgttttatctattgcgtttcttgccattttggacgtaacatcgtttgacacaatcactctcaggaatatatcgtacactatctgtaggtgaggccagctcttttcaagtgtaggttcatcgtcttcatagtcataaatgttccttttcttagggttttgaggtaatgatctaaacacgtttgcggatagtaaatctatgacgtcctgtaaaatacgttcatttattgaatttctagtcgtactaatgtagtcaacaatctcgagaagcacttggcgtttcaactctatggccttctgcatttgtttcttagggtcaaaatcaaccacagtttggcatgcgatcagtttcttctgaaataactcaggtctgttcgctgaaggagtgtctctcagcagaggcattgaaaatacttcctcaatactcttattatattctgggtcaacatcatatattacattttcctcaacctaaaatattttgatattctgtttatagtatttaggaaataaataaataatgtagttaaagtactgattggtttgataatttgatcactgtatgttctcttgaggtaattgatggctttggcttgggtgaaaagggttctagattaggcgactcctggggtttagcgtcttcaagtctttgcggtgggcttttctgacccttctgacccattaatttaaatgattttgattgtgatgccttgtgcatattattcagcttgttcctgatgctgaagaaattacgttcttttaccactcgtttttgctccttgtttgagtcctcatcgtagaaccagatattattgtcataggttgcttgtgaaaggttgatcccactggcgtgctttacctcaaaatcactttcatcagaagatgatgcgaacggaaccgtgtggtacctgtaacccacctcaattatatcatcgttaagcattattgtgtctttgctgtcggaacggaagggtctttcatttctgtatttatcccattgggggttatatggtcttagttgatgcggttccatatggtcttggacttcatcttcaaaccctctaagagagaggggtgataaagatagcgagcccactgagctgtcgactaagtatgattctccgcaggatttgggagagtttgaacccattgattttgaggttacgctttcacacctcatgctgctagagtcacttagccgggaaaaccagcccctgcgctctgattttactgatgctggagtgtcatctgacaagcggccagtacttgagggggttccggccctatactgggcatgatcatttttccttgtgggagatcttgagaacatgtggcccatgctccggaacagggatttctgaggagaatcctcaggacgactgcgtgatgagcgggactcatcattatccgaactagctgatcttttgtctcgagatgaacgaaataatctaaaaattaattataaattaacaacccaacctcattttgaaaactcataaaattttttataaaattatgagcaaaaattatggaatttgatcaaattaaatttcatgggttttgtttaaattttatatcaaatcaaatttaacgagaagattcaatacaataatatacgtctcttaactgctattaataaaaatataactaaagtaatgtgaaatcacaaaattattgaaaatattaaaatggtttaataaagatataaaaatataggaagtttagtgttaaaaaaatgaatatgtggcaaatataaggttatcagataaaatttaatttgaaaaaatgtcaggtgagtataaaacataaaatacgacttctaataccagtaatttgaagtgatgtgtgtttaaaatctgtcaaatcttataaatagtaaaattgatcaaaaagtaagccgcggtagctcagttgggagagcgtcagactgaagatctgaaggtccctggttcgatccctggccacggcaaattttttttatttcgtttattaaaattattaatttgttttaattaaagttttgattagaattatataaatcaaagttaaaaatactcgaataatccagttttagtgtgtttcttcgtaattattccaagatctgtctaaaccccttcttcctatatagaatcaatgcccaacttcaaaaacacttttaaaatattttttaattaaattctataattttattaatgtgtcattaaaggatcattggtgatttttgttgttatgatttaaaatcgaaaaatgaaactccgccatagtccaaatcgtctagaggttaggacaccacgttgtggccgtggcaacccaggttcgattcctggtttggacaaccttttatttcacaatattttcaatgtattttattttatttattggaatttaatttaattaatatacatattagatttatctgtacctttttgttctactcccgatgtgttaattacaattcttcttttttttacattttatttaatttttcaataattgtatatataatgggagatttatataatcaatataactcccagatacaagttacactggagagtattaaagataaagttaaactatgtaaagataatccaaactgtaaatttatataatttactttattataatgaggtttagccgccaatattggagtgtatttggcagaattggacaatttgttgaaatcttccgagcaaactgtattttcctttccaattttgatctttagttaatgcaaatggagcttgaggccaggagttattctgactcctctgggtttgaacgcctagagcaggtattctggtattcaattgctaaattcactagttttcctcatattttcttatatttaattttgataggtcaaggaaataaagaactttttaaaagaggcctccgattgtagtaggtcattccacactgagcttcagcgtagagaactacttggaggtaatattaagcttacgaatagtatttagaagtttcttcctttggaaatacaagagaatttaaaacatttagtaagaatcgggaaatgttaagtaagggccttatgttcatcaaggtacttgaaattagtatttatcatatttaaacgccatatagacttcgtgtgatgtggcgaatgaggctgaaaggctaggatatgacgcatcaaagaacttaagtcagcagagaaatgtaatagacagtgttagttcggagttgactagagctaaattttctctatctggagctgatgagtatttgtgttgccttttgaagcagggcagattgaacagagttattttaaaaaccgtgcaaatcgcaatcgcagttacagtcctaattatccttgcaattaggctgattaaatttctcatgctgaagcctaaataatgtaatatagttaaccctcctgtactaaattttgcctgaattgtacgttttaaaaggtattatgaattagtagaaatttaaaattattcattattgttgcttttgtgttgtacttttaaaattttcgaatgggttgcaaacccgttcattagatgtacagctgcactggcgcttataggattatcgtaggttacaaacccgaaacctgcaagtaatttacactcgtgttttagttgatacctgagttgcatccattagcgtccctttgaaccttcgctgagactaaattaccaaatggagtgaagtgcatggagagttcagcatcgtcccatacgttgggaatatgaaatataaacaaatttgaacctggaggtgcattcaacctattacgatcacctacattccattataaaattgcttaaaatagtgaataaaaagtatataataagatatacaatatggtatataacttagtagggtaatactcatgaaagaagttgaagcttcaacagctaggagaggagggattggcctttcccactgggtgtgacctgtgattgaattatagtagtaaggaacaccgttttcgtccttgtatacatgccacaatgtggttcgcccagcgtcctgtaataaatcatagctctcctcagtcagagagttgataagagaggtcctatgggcgtcgctaagaaagcccgaggagtggtttctgtaattttcattcttctgtccggactcgtgagggtttgcaaaccgtgcctcaattgtatagtccgattctaagggaaattataagagaatattgtgagatatggaaataaataaacgaaaaagttaaaaaaaatatttagagttgaaaaatataaaaataattatttttcatacgttcaaaaagtttcttgccgtgaattaactgtatacattcggaagcgtcctcgaaagtcttaaaagtcaagaatccccaacttctgatgggacacttcttaaaaacaatctctgaaacgggagggactccagcgacctgcagtgccattagcaaatcgtcggtttccacgaatccagggatactacccacccaaacccgaagttttttctcgtttaaagggtcatcaaaagtataatatggcttgggctgtgaagaatggttggcttgattaatgtcattcattctacaatccaaccacttaaaataaaatatgctaaattatatattacatttaatggattagaatgactaattcactgggttttctgaccatacaccacattcttattaatttttacattttcctctatttcttattttctcatattttgaccttgatttacacttattttaagtatattatatgtgtattataagtatttcttgttccctgttccatatacaatttcatgagtcattttattcctaattgaggggaattttgccataaaatcacattgtagttttaatctaaatacaattttaaacactaatattaaaataatgtataaatataaatttaatttttcaaaataataaaggaataatggccaaactagaacggtctttaaagattccacctggaacagacgctaaactgggaaataattatttaaacaaccacaatggtggggattcagacgattttcgatcaaatgaagatgaaattatggacttggccactctatacgataagcagttccacgaggtaattggccgtgatccatacagatgtaagccctggatagaacatgtgaatctgctaaaatcactaagacctccaaggaaaacccgccaattgtacagaatttcagatatttggaagcttaacagagtggatcaggcacctgaacaggggaaaacagcagtcctgttaggtgatgtatcatacgagaatataaataacaagatatttaaagcttatgagaaagctgtaaagtacattccgcttagttataaggtttggtataattacgttaaggacctggtggaggatctatcggaaccatttgtatctaatccccaggcctatgaaagagtaaactcggtatttgagtcttgtttgatacataattttgcatatccgaccttctacttgttatacggagcctttttgagatttcagcatcgcattacaaaggttagacgcctgtacgataaagcactacttaacattgcaatcacacagcatcacctcatctgggatgagtacctcagatttgtaaatgaagtggatttgttaccccttggaaaagctgtttacaggagatatatacagcttaaacccagctacagagaagtgctatatgagtttttaaagcggcacggaagctatgatgatgcggctcaggtgctatataagcttctgaatgaccacactttcgcttcagaatcaggcaaatcttcatatgatttatggtattactcctaacattcacagttatacacatatatctatgatgtagtttacattttaattatttttcaggattgagctctgtgagttgattcgggatcactctgacgctatcaccagtattccagttgaaacgttgattaaggagggtatcggtaaatataccgatcaggttgcaactctttggattattctggccgatatttacattgttagagggcaacttaacatcgcaagagatacatacgaggtactatagcccccaattatatatatatatatatgcagacttattttattaattttataggaagcgctggatagagtaactaccgttcaagatttttcaataattttcgacgtttatgccaaatttctggaaaattacgctaaacaatcgaataaactagggtatgtgttgattaataatttacatttacattatattaggactgaccatttggaaaccttaatgaccgttgagagactggagagtttggtgaataacagagcactgctgttggcatctgtgaagctgaagcagaacattcacaacgtatataactggattaattacatacaactgttcaaagatgacccgaacaggatggttgagatatacgctgaggcggttcagactattgatgtttccaagagcgttggcagagttactgaactgtggtctcgtttcgcaacattttatgaggaaagagaggatttagagaacgcagataagatatacgaaaaggcgtcaaactcagattttaagtacgtggacgaccttgcaacgctctggtgttgttgggttgagatgtacctcaggcacaaacagtttaagaaggcccttgagattagccgtaggtctgtaagcgggaatggaaaaacatcaatttcaaggcgtttgcactcctctgttaagctctggacactggctcttgatatggaacagaactttggcaccattgagactactagagccacatttaacaagatggttgagctgaaggtcgttacacctcaggttgctcttagttttgcaggctatcttgagcaaaacaaatactttgaggctagtttcaatgccttcgagaagtgtgttgttctcttcaagtggcctcagctctactacttgtacctaccctacctgaccaagttcgtcagaaggtataaaggcactaagttggagcgtgctagagaaatctttgaccaatgtctttacaacagggagttgaaggtgcctcccaagttcgtcaagtaccttttttatctgtatgccagcatggaggaagagtatggcatggtcaagaagttcctttcaatactcaacgatgcttgtaaactggctgacaaggaggaccaactcacgttgatcaagttttacgtggctaagacctgtgaattcttcggagttactcaaacaagacaaatttaccagcagtgtcttgaatacgtcaatgacgatgttgctagggaactatgttccatgtatattcacatggaaaggggactcggggaaatcgatcgagccagagccatctatatctacgcatcacagatttcggacccctcaacatacaccgatttttggaaggtattattttttcacattcttaactattaattatatatttcaaactacgacttagctatatatacttgacctagtcttttatactatatatatagggttggagagagtttgaggttttacatggaaatgaggactcttttagggagatgctcaggataaagcgcagtgttcaggctcagtactccaaagtatactacaacgtcgaggaggttggccaggatgacgacgacgaggaattggaagagaacccactaaccgaactggagaaactaagtaaaacataatgtactagtaaattagagttattttttatttaatctgaacatatagtgtttgacagaccataagcctctttttgattcgaaagcaatatatttatctcctgaacagattctaatgctatttaaacctagaacgcaggaaactttctcgggatacggttcgtactccttgtgttcccaaacgacttggtctccgtactttacaagactacacatgatcccccttttcagcttatataaagtggttctggcaaggttggtttccagtttatagtgatcctcattcataagaacataattagagtttttgtcttttgtatataacttcaaatgcctcggaattgaacataaactaagttcccattcagaattttcgttttgttcaaacaaaataaaaaacttgtcaaatcttaggattatttcacagtcagagtaatcacaaaatattgattttggataacctttgttggggttatatctccagatggtttcgcggtcataagaaacgtcgatacaccttaccccttgttttagtgtgaatagtctttgatctcgttctggttttgtgactttgtaatctccactatccatttctactttattaccaaattcatcatttttatacattttcaataattccaaggtaaagtccactacctcttcaacaccattggaaaatgtaagtttcatatctgtgtcaacatctgtaaaataaacactagtagggaaaccataagacttatcgttgtcgtagctccagtacacctttccatcgtgtattattttgtataagtccttgagaaaggtaaccttatacatgaaactggtgtattccacagtatagtcgtcagggctgagttcgctatcatttttggtataaaattttaacatgtcgacatttggtcgagtatatttaaaaaattctaaacgtctttttttgcttgttttatctccagattcatatttattagactttttcacatattctgccgagaaacagggagtgcacgcctcaggatcatctgtttcaaaaaatactttaccgttttcaatcagtttgttgaacacaaagcccttccttgaaccatagaatcgtccagttctgttacaaatagttataaactcattggtggacatgataaaatcggtgtccagtggaattagtttaagaggcattttatagcctgaattaatcttttcataatcataaacacaaacatttaactgttcagaattatcaatcttcatgcgtttttgtgagttttctaattcactatcatctctaggacgttttaggactgtatcattcaggtaaagtggtatagaagaaccgtcccttaacagtgcagttacagttttatcaactagattaaagtttaaatattctggatatggtcgaaacggatcatccctgtagttccaaaccactttgttgtcataaaatacacggtcacagagattattgaaaataattttaaaattatggttattaagatcataataatggtgatcaaatctgaccaatttatgtcctttatgaccttgacaatcttctgtgatataatattccaatacaaactcgtggcctgttctttcaatcatcttcatcttattcaaatttattgaagtatttacagactcccatgtgttgttttttagttgatgtagaagtactaaattggaatcatgtggtataatcaagatatatttatcacaagagtcttcataaaccaataagtttttggaaaattcattaatattattggcttcccaaattggtgtgtcatcttctaacaccttgttaaatatgtatcctggatatgaactatactccctgcagctgttcctactaaaatattcaagcttgtctgtggtttcttttatattaagattcaaggtgaccaactcacaattttctggaggaacgtcagtgggatggtttttatcatcagttattggagtcattctatataattcactcttaatattaatgtaaacagtggatctgaaccttaattatttgggtaaaagatctttaaaatatagatagacaatgtggttgaggatatggattctgtagatctaaatgttattaatatgagatcatgatactatatcaaaataaaatcatacaagatataaaatgaaggaataattattaaactggttttataatagaatataaattttttatggcaatttaaaataatatataatactggcttatatttatctattttctcatttttaattccataatacatcaaaattctgcccaaaataataaaatgtattgaattttcacgaaataataattttagataagattcccacccaatattctttatacttccctggttctattgattttattatcaaagttcgtagtaatgcatataagtatatctaatatatataacaaagatcatacacaaaagtagaataatgaatataagattaatattacaccaacataacagtttataatacagtacagtgtgtgagtcactgaaactagaatccagttaaatatggtattaagtcactgtaaagaggtgaatttatagaaagtgtagtcagaaactgacccaatttttcgaagttctctgattcgtggccttgtaacagcgagtttctaaaagatgctagcataaagtgaacgctgttgtagtttaaatgtttgtataaggatgtgttgactgagttatctctcagaattctgacagttatgtgtaacagtagtacgtccttggtaaggggagtttgaccctgtgaaaacactgagaataactcatgatcagagagataaacaagccttttcaggaacgaaatgtggtaactctctggatggcctagcttctgatgtagaacatcggagagtgtgaactccaattcagtggtgaaattgatcatagtcagtttctcatcatcattcagtggccaagtggttatagaataaacaaggaaggaagcaacagttgctgaacaaaactttaataagaggtttgtctttcctactggtaacagaggatcgaagtaagagtctttaaggaagtttaaaatcttaattatgttgttggttgatatacttacctgctggcaagtccagttgaactccatgttatcaacagaaatgtatgaaagtatatgccatattgtatcagaagcatcgtcagaccagctactaaccaactctatggcttttccatactctaaaacctttgataagttagagtcaggtgttatcagtgaacccaggtttgactcaatcccatccacaattgtgaagacgtattgaaagagttttgcgtttaagacttggcaatcgttaggcttaacgagtgttatcttactcccgccggcactcaagctcaacttcgttcccttgaaagattttatctgtgaaatgtttccaaatactgtctcaagtgctgaggaaacgattgaacaaatctgtttgaacaaagatggacacatcttggacttttccaagaaatctgagaccacactccagagctcattgttcactggcaggttcatcagcatgtgggtagcctggtttaattcggttgacactgccggaggtgaagtttcaagtgtcggaagtgccttgatgcagtttagaaaagatgtttttgacactgggatgatcttcttggctgctattgagacaaaaatcttagcataatcctcacacagggtcttgtagtagtgcctgtgtatgttgaaagggatgttgatgtgtgtcaactctgcgtgcatagtatcacccagcgatattaactgtggaactaacatcacgacatcataactatatcattatttagtacacagtatacttgtaatatactagtaatatacttaatactatataatatattttgttgtcacgagttgacagtatagtaagtgaatggcgtgggaaagatacctgtcatttgagtataatttggatagagttgattgtagaaatgcaattgatcttttagtgtaaagttcgagtagtgagaagggttccttttggtcctcatggacgtaagtttccaggtaatgagatatggtttcacgttcatttttgtccagcttttccagtagtgagtgtttggtgcacttgcagatgaaataaaggcttttctggttcctaacgtactttaggaagaactgtgaaacctgagacatgaatatgccctgccactcttcatagttactttcactcattacctcggccatgtcaatgcaactgctacagtcgtagaccaaattttcaactaattccagcatacctttggaagacactgatagttctctgtatattacatgggatattacaactattttttcaatgtctttatctggctcgacaagattcatttggttgagagttgaaccgtcctgggctccactaagctcaaacaaaggagaatatgcgtagttatacacaaactttactatgtaattctttaaatcttcgcaatactgcataatttttaaaataccctcagtcttctccaaggtgagtattttatcaagacacatcatgcactttgaagatatcagaagcatttctaaaaaatcctttactgaggacttgagcctcttgctcctctcatgaagatcttcgaggaataaaataatcctcctacactctaacgagtataaatacaagctgcgtaaacgctctaaagatgtggtgtcagcttctacagtgttgaagaaggataaaatgcccctgtaattgcagataacgccctcgttcaagtggttcagatcaaggttcagagagtcaagtgtagctgtatagtcgttaacctcttcaaagctctgaactatctcagttgtatggttgagtagcaccttgttcattagtgaatctagtgttgataagcagtggcttaacttctcaagctctttctttatggcttcagggccagtcttaattagtgatgatatataggaaggagaaggtcgtaatggttcttcatcttggagtttgtaggtagatttgtctcccctatcacctatgtgagattctgcaccagtgctgtaagagtgtagaattctttgacatgtgttgaaaacctcagaatccagggataaaccttctaattggatatcaaaaaagggcggaggtgataaatccatcccttttcagtactttaccagggaaataatattcctgggtaaattttatattccttcttccatgactacttcagagtaggctgcagttggaaattttaactgcatacaaaatgtgtaaaaaatatatctatatttaaaaaatagtaaaaataagtaaataaattattaatgttgaaatatttaataaaatagtgtgtatagaatagtagtgtagatggtgaaaattttaggtggaattttctttaaatttgttttatatgtctggtagtttctctgaaccatatggaaactcctgtgattctgaggaaggatggttcaaattgccggaaggatggagaatggtaagtttaacgcacaataatacctttcagcatcggaccgttctgtacagaagttacaaggaccccaaaccttcaactagtttcgccatttatgatatggataatactcttatgataacgccgagctactttgtcgaggaacttaaaaaaggtgtccaaatccagatctcaaaacccttaatacccaatgattttgttttatttgctccaaatgtaaaggaaaaactccattacgaactcaaccaggggtaataattttataaatcttgttttaaccatgcataatgctataggagaggtattttgatcatttcaaaccagcgtggtatgctagagaatattccttctgcatatctgattctaggtttgtttaatactttttatttttcttcagaacggattgaacttttgttaagagagcgtttgtttctatttctagcctttaattagccctatttatgctctttataaagctttgttaaccatgctttagttgacgtccccttgtatatattgttagcgtaagtttacattttttacatgatatgtagaactgatcatgatatttatcgcaaacctggtatgttaaaccttttttcattgttttagcacctggaatgctactgtttttcgagaggaacctaaacggaggccttccagtggatagggataatagtttctttgtaggagatgcagctggccgtagattagactataaatcgtcctccctgatgatgagaaacatcttatctgttttaaagtctacagactactccaccagaagatactacaacgttgatgaaaatggaactattgtttacattaatccttacgaaataataaagagattgacaatttctaagatgaagaatagattcagcaaagatttctcagattgtgacttcaaatttgccattaataattccttaacattcttaacacctgacgaatacttttacggtactccctcaataaccacagtcatttcccctccctaactagttatttatcaagttacaccatataagagaatataggagttccggagtataacattaagctggactttgacccattattggtcggatcaaagccgttttttcccgttgtcctaagtggtttgattattttgattgggaacttggcatctgggaagactcatatttcaagaatatttaggaatttcacaccaatgtctcaggtacttaaaacaatattcaaaaacatgtagtctgactatgaaactacgtttcacttcatggaaacactgaggaaaaagctgataaaaagagaaaatgttgtaattgatgatattaataacgttgtaagcaaccgcattcagctggttcaactcgcttcctcgctgggtgtcttggtcacttttgtgcacttggacctttcccaaaatttggttaatcatctgaacaaagttaaaagggtgtgtcgttagttacttaactattaattcacatttaattgaggtatagttatgttgtgatgaaaatacgagggaatatttccaggttccccaagtaaagggtacatttcacagtaagaggcagctgaccaaattagtggtagaaagaccttctctagaagagggcccaaatatcatttatacaatcaatgatatctcatttccaatggaacataatgagcttacacaacttcatctgccgtgataacctagaatatatatgtaattgtcgaatgtttaaaccgtcctgtctaaactgttgtatatatattatatactatgtattatatacattagtgtgtagtggtgactattagtatgacaagtcagttaaaggaggaagcatcacgccattgtatgaatgcttcagcaacggcttcgcgttcatgattgtttttaaagaccatgggaagtgcaaagccctggggaaattcctcggtacatgagcccaggagcacgagtgtgttaacatttgaaacccttttgtagtctttctggttagctttggcaaggaggtcatgtttaagacccctggcaatgttcctaactcgcatgaaggcaattttgttcttctcttggagtgcatcatgggtccactcgagagtgagaaggtcttgacttgccctccaagagtactcaaactcctttccacgtttcaagcgtctcttcacttcctcgtcaccctcagtcacgaggtggaacttgccgccattcctgagcatctccttcatgctctctggcaagtcatggacaccattcgggtaaggatccacattccactcgctcaatcccaaatcaaatttcccaatcactaatacattgtacaattggataattatataattatataattaaatgagtaggtggatgaatagttaaataccggatggttgagtgttatttgaaaagtgttcgagtagtttggttaatttggccttagtttgtttatcggtaatgacaagtgtgaggtctctgagcttcttctggattggtttggtgagtatgctactgcggaggtcaggagggtagttgaagctggactcgagtgctgcaacagccagaagtgcgaggttcggagcagttaagcagaagtttgagatgaaattctcgagtatcaatgagaaaccgttcattgcaagctcctcgccacaaagaccacaagacataaagtaaacacacagagaaaccactgaagactgaagcctagacatcttcagacaagactcttgagaagccacgtaacagctaaacttaatcacctcaacgatggtagtggctgtcatccctatgttctcccatccataatctgattccgcatcactcacacccgtactttcatctatcacaaattatacagtcatctaactatatatactattaattagttaaataatagtaaaaagggtaaaaagttgatctctgtagaaattaacagggaaataactctgtggaaaatgctagtctaactagtaacttggaaatattaattaagaatataaaaatcatatagcagttgggatgtgttcgaacctgaatcggattgttttgttggagtatgtcctccagtataggggtcagtgtaataaagcatgccaaggatgagtctaattgactctacaaggacactgctctggtctttcatgcgggaactgcacttgatgacggtgtcgagcccatcttgggagcaaaggaggtaaaccatttcaggactgtgaattagtctacggaggcatcttaggctactaattaagacatcgttgagctcatttgcttgtaccaaaatgtcaagcaatagagagaaaatgtcaacttcaagtaacttaacagccccagttccgtgagccatgtgccgaaacaggtgaatgccagtgacaaggacctcaacatcgtagcttagccttcgcatattcttcacaacagcaaacacaccctcaagttccacaaatcgtccagcattgtccttgtatctacacaagttgttcagcacatctaaaaccaaaaacacgaccttcccatcagcaaactccgagttcaacatggaaaccaaatcctccaaaatcacaccaaacctcttcatgtaatctccgttattctcaacaactaaattactcaaacaatttaatccaacctttaccaatcccacatcatattctatacaatattataatgagttagtagagtgtttaactgtaataatagtaatatactaatagctacagatatagatagcgatttttaaaaatacctttggtatgtacaactttgttaaaccattttttaaaaggtgattcgatgtgagcctccataaagtattggaggtttttggtgtagagcccgaggttagaaatggccttgaagagtgactcgaggcaacggagactcgttggctctgaggaggctacaaagttcatcaaacactcaaccagtgcagaaggggtaccatttttaccatagagctccttgagcttgtcgtttttatacagtaagttgcagagtagaattgatgaaccgttcacaacctcaaagtttgacttaaagtttacaaacacttcaaggttcagacgaggcccatggagggtgcaaaacttgtcagaggcggtcttaaagtcaacgcaaatattggccagagccagacaacagtttgtaacaattgcgctgctcgaacccgactttacgtaacgatccaacaccgctataatcttctctagaagctgcacactgcaaatctcctccttgatctccaaaattatagccatgcttccaatcaaaaacaacgcatctggtatcaaaccctcattcacactagatacagagcctcccttactctcctataccaataatacattttatacttgtaaaaataactataccaatacttaactaattgttgtttgggtaaaaagataccgtggtgagttgagagaagactttattggttcttggcacgagtttgcatttaaccatgagttggacattttggtcggagacaattttacggagggttcggaaaacctgacgtaaaatcttagttgaggagtacttgttttggtcgtggagactccagacctccatgagactggggatcacattgctcttgagataaaccttgcggttgactgctgtaaggtcaataaggagcatagaattaaagagaacattttcgtaagcagagtcaatgttaacatttcgatcagcgccagtagtcactaggcgcttttgataagccttggccagaaatgaatcggcatttggaaccaattccttgttggatacaaacgagagaagcaaatccttctgtttacagcagctgcacaacgaaaccaaaagagcatccatcagcaccaagtccgactgtttagccagggcagaaaccagcaatgcagataggccagacttagccatcatacttgcattcccctcacaacgagaccacacatcaacacacttgaacccaaacccaaagtctttgcactctgtatcgccaggcttctgaactttaccattgtacttcaacaataaatcagacacaaagcgaaaatcttccatcatcaaagcattctccaatgtcacagtagaatagtctggagttacagattcatcactggaaccagaatttgttaattcggtcaaattttgatagacagtttcacacgtcttcttctttggtaaatccttcttgatcaatgtcatcaatttatttacaaggtcgggacatacttttgaaactacgtccaaatacttcataaaaggctctacagaatgtaaaaggcttccaacgcccttgaccccagtggcttgaattaaggagttcagaagcaacgaaacaacctcaggatcagtattcagaacttcattcgacttgattttggggaaaagctctttaaataccaagactgccttaattgcgtccctattcacagcctcagaaagaccagaaagaagctgcaaaagttcctccttggtcaaagtcttatcggactgtaaaagaccctcaaacagaccaagcagcttctgtacaacacctaaacgttcaagctgagccatctcaccagcagtagcagagtttaacacaaaaagagcaaactgtacagggcttaaaccttcgaaattattcccctcaaacatcatcaccatgttagacacaacatccccactcatgtaatcattcaaatacccattcatatatgccgagttaaagtaatgaacatatgaatccaatgcatttttacccatttgtgagctgttttgcggcaactttttgtcaacagtattccccttagacgaaaccgccttagccagtttaagacatgtttctacactgttaaaaacttgattggagtctaggtttttggtgctagacactagctcggccaaaagattaaagccggtgacaagcaaagattcgttgtttttattaaccgtaagagcactggtaattaaatcaactgggtttccgaaattctccaaaagtacctgtacaccaggggtagtggtggcaggatcagatccagtggcattagccaaatacatacaatactccaacacattaaaaaccagttcagaattttccttataccgttcaagaacctgaacagtcctaaccataaggccaggagcttcagcgagcatggtatctacagtataaccattgtaaacacatgctgtaaaaactctaaaggcattaaccaaaaacttcaagttactgtagccatactcactctttaccaaagacgaaatctgagccaagttgctactgcttgcaactgaccatgctccaaagggatcttcgtggtcctcgaaggcagaatcgcaaagccttcgtgaaacacagcaagtgctggacaaaaggttactattgtcagccaaaaacgaaacacactggttcagactagatagaaaaggttcagtgtgcttcagagcttcagatcgttccttcaattcacttcccaagtacatcgcaagaattagacataacttgtcgaccttctgtcccatattttcctccttagcctccacaatctgtatcacgttacgcatgagggctgaaatctggcactctgcacccagaagtgaaaacaaaatacctcccagcctactaatctcttcattttccaggtgcattagcatcacagttgagatgctttcaactacgctagtcttcttacactcctccttattactgtcgtccagcaggtggactaaaagcgacagaagtgcaaccactgcgctaacgtcagccttattgtaaaccaaagtcttggaaactgtttccaaaaatgaggaaagattagggagcctagacagtacaaccttcttgtcaaagtatgagagaaggttcgatgctggaaccacaatctcagggttcttgtaatactcctccaaaagcccaaccaatgaagccacaatcttggtattcttgtcaaagtagtcaattaatgcctgatacttggtaccgagcaactcgttcagagccaccagtgtattctccaccaccttttccttatccatagaacctgtagtttggggtgaagaaaggttatccacaaggtaattgcaaaacttggaaaagttggagttattcaggagtttgtccaacttgccaggacttgcgcacatagatcccaaacacctacacacagacgaaaccacagaagagctattcaaaattctagtgaaacatgaagatagcttggacaacaaatcgtccctcaacgcctcgtcaatatttgctacatcatgacgaaataacattgatagaccatccaaggtagacacaactccatcctccatcatcactatttaacattaaaatttataattattaataaatataatagtatattacacattattagtacggtaatggtataataatatttaagaaaataccttgagaattactggttagagaagtgaacaatttgaggaaaaacttagtgactgagtttttagtggcatatacaagacctgttctaaaggccagcacgttaagtcccactagtgaaaactcagccaaagtgggctcaaataaattttcttcaccagtgtatagcttagggtttgcaagtgtccaatcaagggccttgttaactggggaagcaatattcagcataacagcagcttttacagcttcctttgatacgagaagctggttgattgaaacaaggcaggtgttaacaccctctgcatccttgtctgtaacgtaatttaccaaatccttaagaagctggtccaactcagactccagagcgtctgcaggcatcaaaagtgatagcaaagaaccaacgattgccctcaatttcttgtttttagtgtgagttcggttcacagctcttaaaagctggaagcaattcgaagacttaagaaactcaactacctgagggtccagttgtgaacacttgtaaatgagaccaatacccaaaatctgtaaattcaagtacattggaacagtactcaaatactttacaatcagagccaaacacccagtgtttagaatggctgataagaaaaatctgtcagactgctccattagtttgtttaaggcctccaaaagcgatgcctgagcctggcgaacatcttgatggcgcttcattaccttcgaaacacattccacagcctcctgcacctcagactcgtcgtaggtcctgtccatggcacataacaccaccatagctccagtgcagtgtagcaaaaagttatcgtcagactgttcaaggtcaatcacctttttaacttgataaacacatgccaattcactaacagttaacagagtttcccgaatttcctcattcgtctggcacaccacaacgagggatagggctgctctggtcaaattagtcctctgtttaacccactccgggcctccgttgtggtccaaccactcagtaacagcagtcaaaacaccgttcaaaggattatatttcgacaagagaggacgtaatcttgatattttgtgaacaccagtaagtgctgtcaaggccttaaatgtaccatcaggatccttaaccgagtttggcatagctgaattcaaccgttttgcatatttttccacgtccttctcttccaaaacaagctccaaaatcttaactgacaagtcaatcacgggctcattgtccctgtagtgtagcataagctcaaggataacatcggcgatcaagtagtctccagtagtcaaatacttttgagcattcgaagtggatgccaatgcagagacaaaatttaaaacctccaaacaatacttcaaatccttgtaattctgatcaagagcaaaagtgataccttgtaaccctccatactcatgaatgagtttcaaattatctatgaaacgactaaatctgttcaggattgaaaccacgttgaactgataagctaggtttgacgtgtggtactgacagcaagtgcttaaaatttcgagtaccttgttctggataaagacattctccaactcagagtactgactggatgcaagcaaaaactcaaccaaagcgtgagaaactgcctcgtcttcagccaactggtaaaggattggaagtgctactgaaactgcgtttccaaaggacttcggctcatactttaaaagctgaacaaggaccgaagataaacctacaactgatctcgggtactggatgctctgtgaaagagccctcaccaaaacatccaaaccattgtttgataacacctgttgtccgtattcagagctacttgaggaaatagaggccaacattctcgaggctccaaaaactacctcagacagctgttcaccagaggctcctaattttgcctcgccagctcctagcttctcactgctgtccgatagcagctttaggagaattggaataacaccttttttagccagttcttcagacattgttgaaatatatgaaagtgatctcaatgtattcacagccaccttgtattccgggctgtcgtaatcgttcttctcaagtacctttaaactgttctgtaacttggcagtgtcgactacagattttatcacctcactcgctctactcaggacaactttcgagtccttacaagactccaccaaattcatcactgcctgcaaattcgactcctccataagcttcaactggcttagagccaagagtgtcttaaagcaattttcaactagggtggcacttttgtcattagtgaggaatttcatgcacaagtcaagcaagggctgaataccttggttatttttcaaggcaaaacaagactcactttgattggtgaggttagaaagacatagtactagtctgttagcaactgggtaggattttacaacttccatagacttgcaaacatgaggtacaaactcagagcctctattaccaagcccttccagatttgatacgttttccaaaaacttgatgcagttgtcaagaacatcctcgtcttgaggcgctctttccaaggccttttggaccacgtcaactcctccatcagtaacaagcttcttcaaaagacctgagtcctctctatattccaagcagccctttgacatcgtggacataatcacagttgaacacaaaaccaaatcttcatcgtctccaaagttttccacagctgttaaaatacctttaactacgttcctttcgagggcgtagagggcattttctacgtatagctgattagatggattacacaaatcagagagtgatctaagtccgaaaaccaacatttttttaaacttttggtgttcaataatagtcgacacagcgtttgaaacgccactatctggtgctcttctcattttaccaaccgccattttaggtattattatcagataactctataatcgcagctcaaattccaaattttaactcttgacttcaatattttccaaatgtgtaagttaaaacacaacgggtgatatcaaatatggcataatagaattttaggaaaacagatgacacatacacgtaaaagcggatttttaaaaatattttacacttattaaacttcgtaatttttagttttttagaagttaaaacaaatataaggattttttaattcaatgaataattccacaaattaatcaagcataacattaaaattaataacatcaatcactaaaactggtgtaacagtaatattaaacaaattttatattgaaatgtgtgtgtgcctaagtgaataatgctcataccacatcgacacgccacttcaccaaccactctaacacattcaaccatttttatgcattattcaacttctcactccaattttttaatcttaaaatattttattaatttttattcttaataatttaaataaacagcaactatattcatacatatatattagatactgtagtgtaattataaattgagaaataaattaaaatttttaaaaataaccttaatatgaagcataatatcgttaatgtgttgtaaaaaattaaacaggaggggattcaacttcgtagacccagtaccattggtgtccaattaccttcactgtcatggtggtgtagactgattcgtccaacatgtatagcatagtgtagcagggtattgctagagagaagatgataaaggttggtatccagaagaagcaaaattctgctcttagagcgttcttgtgatcaccccagaggttcaaccttcttctgtgatagaaggggacgttggtctgctcaactccaaaaagctcttccatgggcctagtctcaaccccaagcaccattgcttctccgtttacaatagtccttctttgcttaggcacgtctgtgtatgcgtcgtaccagtgaaagccatctgttgcatatttctccttaaacctcccgtcctctctcaggtgatctctcgggtccccgtgctgatgtcttacaaagttgtacattcctgtaggtttcccaaattcaatagatggtaaatcttcaggttgccctacaggcttgggaagtcctgttcctctgtatttgccagggccaaaagtttcactaacatgtgtaaactgtttctgattcttcatattaactgaacttgactcgtccgaagtagaattgttggcctcaggctctttctttgttgtaaacagcagtaaacgtgaggtgaaaatgtgtctttgagaaatttcatggtttggatatagaattccaaagtgtgattgtggtgtttggaattttgtgttttttaaaagtgacgattgaaataatctcctggtgatgccagaatatgtaagcatctttaaattggcttaaactgggtaaattaaatggtatgtaattgagattagagtaattaattaaaatgtttacagtattagaaccaaacccatgtggtttctaaaatttttatgaaaataaactttacaagcttactgtaaagaactaaattaagaaaatttgagaaataataaaaatataaatagagcggaaatagaatactgtgaatataaaacaatgtgcatacccaatccctacaaaaccatgaaatatggtacttttgttgtaaaaattttattattttataattaacacactttgtatttatacttttattttgatttatttgatctattttagaaattttaaattttgccgtatattatattaatcgtataataattttaatagtgtttatcataatttgtttccttgtatttaaggaatctttgaaaaaactaaaactatttgttgtatttttcacaaaccctaatttatggttagttttgggtctctaaagactcgtttttctgtatgtaattgtcaactgtctttacctttgtatcttcggtctaacaattttggttatcattatactggatataagagtatatctgcatcatctaggctattcaactttataaatccccaagatgttggaattaaaagatattttaacactggattttttccaaaattaggaatttttgactcacatttggccagtaaaattcaaccacaatgtgtaggcgtacctttttcattcaagtctaaaaataacttttctacttctagtgaaggcagagttacttgggaggaccacgaagaaatagctgaactcttgtatacggaatttaagtcaacaaatcccctaaccctaagattcactgacttacacgagatggtggaagctgtagttagaaaacatcatttttgcgaaatttcaggagagtgctcagaaggggcactggaacagattcaaatgacatggctagaactttatgaacaagactaagttaagtacacttttgtaggattttttaaaggttataaaatagatgtttattgtatatagcgtagtggtatagagattaaattattgattaaatcttaaatttagagctactttaaagctttttaaagtaagtttggacgattgcactctgatttaattaaataaagtacatgacaataggacgattgggagtaaaagggacgctgttaagaatgaacttccctttttgtcaggagaacctggctctgttggagcaggcgatgaatccgagcctccttgccttcttctcaagtttgtatcctcagattctgagggtttgactaaaggatcgactttaacgagccctttagagtctgataatttcttgaaggcctgtacctcgtctggagtgtacttcctaccgacttgtattatacattcgtcgtcaggtttttcgaacttttcgtccttttcaaattctttgtggaccaggtttttgtactcgttcttctccaaaaattcaaagtattcgtcagcatctaccttggcccagtcttggtcttttttcaagtagaacctggcgtagtggtcttcggcattgtaagtgagagtgtttttgtctaaaagtccaacctttagtgcctctggagcaagacctttataaaatactttgacgtagtcggatttgaagccagtctcgggttcccagattggcttttggccatctttaaccttgtcaaaaccatcgtcgtacatggaagcatacaacacaactgtcttgacggatggtccagctctggtttctgcctctaatttgagctctgtggtaacaacggcgtttgggtcatggtattttgtggaaacgtcaagttcaaaccctgatgttgagcataatgataattttaaaaacaaaaaaccaaaaattaaagacttcattttaaattttaattattaagaaatgataattatgaccaagtggcaccattccctttccccttatcttgagtacagaagtggcactttctcagaattacgaccaccgaagaattcccaataaagggcctcggtattaaaacttggactgtcttccattcaaaaaaattaaatatacttaaaataaatatgtgtaagccagagcagctataactaagatgtatgtgatgtagtgtagagaatcattcatgagagtaagaataggaaaaacatggccaaagtcagagcgaacatcgtcactaccattattataaattgtctaagtgatatgttcgctgattttgtgagcttgttggactctttggcgatatgggtaacagtgtccagctgtttctcttgttctccagtaaaattaagcaaagcctgtttttacattaaaaactaatagtatataataatttataataactaatagaataaaatgtgttaatatttattcatataccttattgtcttttactataatgtccctgtaacgagctactttcgatttcatttcctaaaaataaaatcataaatgattggttaaaatcataaaatcaaataaaaatatgaaaaacaacacacatttgctagttcagcgatttctccttgaatctgttcctgaaagttttctggcttattggcccttctccttcttggccctttttgcgatgtgtcgagatcttcagcccaatcttctatgagtttatcgaactcttcatttgtcatgcctaaattggctccgtatctttcgtaattttccctctctgagttattctgatcaattaggtacatatccccgtatatttggtcggtgtttttcaaggttccagagcttccaatcatttctactgtttctcttgcgacatttattcggtttcttaactcacttaactctaagaatattaaaaattgctatgaaaaaccttgagcagagactccagtttcacactccttcagcatcgaatccatcattttgaagcactaaaatattttaattttagttaatttgtttacttggtttaaatttgtggtttgtaccaaatctgtgagatccaccgttttgttcatgattccttgctctacaaactccaaaaagttggccaaatcggccagaaatgctctgttaccttgcataatattttattatcaacatttgtggaattttttcagaagaatactaattatacataatatatagtaaccgcatattgtgtagagttaaatatagaataacagtatgttgtataataacacattagttttttttaagtctagatttaatcttgttgtattcaggtgtatttgaaaatgatttgtagtagcgccttctcatcattgaccacgttacacatgacataaagaatctagaggaagaagtgagtgttgatgataataatttacaggtcaaggcaattcaaagccactgttgagtagtagtaaatggactttaaatctttacatttgctggctgaaatagctttaaaaaatcctaaatgtgtgttaacatacaagaaataaagttactatcaatgtttaaatataacttattaaataagtttaatacctgtcagaggcttgaaagacgctaatgatgcaaatgcgatgactcctatagattttttgaccccagtagtgttaattatgacattagtgtaaatgaacagtaccaaatacacacaagaggtctacgatgtgattttctaaaaaattaaattatcacttatttcatacgttttatgtattcaaacccaattttctgtaaaatttgacctaaaactgataaaattttaattaattagggttacttgttgctggaatcctcagggaaactgccaaactaaccaaggatccaaataccaagatcgttgctaaatatttgacaaatatgagttacataaaaattcatatacttgtatatgtcttaagaatataaatataagggaatattagaggtttattacctgcacatgtggcattaaatactactagatatctttcacagtgaaggttcgttagcttcaggctctaaagaatttaattttgttatgaatctaacggttatgagatgcgatagtgaaagaaggactgaaacagaccatgttattgtaacgccgttgaaattgaattcattaattaaaatccttcttttcatttatcattttaatataaactgtatataatttattttaaaaaataaatgtgtaaatttaaaataaaaaattatttattgtaaaactggttatttccggcttggatgtgtggtggaacgtttggcataggcatttgcatttgttgaggcacacctcccgaaggaatattaaaattttgaggatggccttgatgaactggtatattgcccatactacctcccatcccattcatatttcccgacatactgttcatattagatgacatactattcatattacctcccatactattcatattacctcccatactattcatatttcctggaattccattcatatttggcggcatattaggaatttgatccatgttcatttgcatagaactcataggtggaggaaaattaccgatgttaggtcccatacctggtatgtttcctccagaattggccatgctggtgggtatcgtattcatactcggatgcaaaagacccatgtttgttggtaaatttgggtacattttcatagtcggttgtaggttaaatcctttatttataggtccctgactgcttaacagttctttaagtctgtcttctcttgagtatggagtatagcttgccataaatttagcgaatgagatattgtttgaaggtggtttaatggtgtttgcctctgcgttttggaagctttgtaatgtttcataaaccttgttcaatactgtatcctgctcaggttctcgtttactgaactttggtgattgtggaggggttcctaagtcaaaatgaatgagattgactgtttcaagtagtcccgatctgtatggatttgggagataattttgcatattgtcgccggatagggcggacctaagatcaagtgcagtaacattgttgacaagtaacttctggttagacgctacatctgcatattcaatggcctgcttcagaaattcatcctcccttttatcgttggacaaattcgggacagtttcgctggggataggaccaggtgtaaaattagaaaatgtaaagtaactattcccaaacgatgatcttgatatagtgcgatatgaagtcaaaagcttctcaatttcatcccttttctgaaataaactttttaaacctgttaaatcacgtaacactaccaactctgatccatcggaatttttgtctttagactccagttcctcttcaatagaccactcttttttaaaattttcttcttcgttattcgatttgtttctgtagggggccattatttgtatatttccttgatttgtgatatttagggtgttagaaccctgggttaacagatagtaaaactggtctaatgcgtattgatgatatcttttgctttctttccacatttcttccataactggcttaaatttgtcaatcagaacatccacgattttttccaaatctacataattgaatggtttatcagtttcatctttcttatccttatcattcttcttgtcctttttattatctgttttatcttgttttgatgtaaaatatgttttgtctccgaggttagatcctgggaatatgtcactaacgtcgtgtaaatcgttgaatctggtcagttccgattttagcattttcgtaatttcttctcttagaacaactttccagtcagttttctcgtcaggttctagagtttcgcttaagaaagcgtccatattcttaggcgagggtgctggaggcttcgaatacctatttcttataacttgatttttgatgtatgacggggattttggaccaattcttggatacatgggagcatacattgagttgttcatgttaaacatattctgcatgcctggcattgtggacataccacctattcctcccatctgaggcagaggtggcatattctgcatggttggtatattcttgggcatgatttgaggacctggttgtgaggattttggagagaactgaacacctctcattcctggcatgaccatttgtcccattggaggcattttagggttaatttgctgaatagggatctgattaccaactttttgggtcatctggttgtggtgttgcatgggcataggacccatattaggcattggatgacccattgggccagggtacatttgagggtgctggatttgtggacccatatgtcccatttgtggatgtatctggtgtgctaattgtggatgtaatggcggtatgaagaaatttggctgttttggtatcattttttgtccgtctggtaggcccattacttgtcctggaggccacatttgttgaggaaaccacgttcctgtcatatttgcatatttttctgaatctccttgatttattgtttccttaatttttgctgtgaatgattcttcgtccattccttccggttgtaccacttttggtggtactttttcctggagtttatggtattttcctcttgtcatgagaccgtgagcagaagttttcctaagttctctttttcttggttcttcttgtttcattagtaattaaaacaaggtatagtattaatttataccattttaacaatattatacaaaacacatactttgacgctttccttatcaccacaggaatccatacattgataaaattcagatcaaactcaatttataaatctcataaaatttcttcaatagtttataaatatttaaatgtttttatatgtataaaagtgtaataatttgaatcgattaaaaggttgtaagttggaatattactttataaaactcaaaattcttgttccattagtttattctctaaattccataaaattccttattaaatttctcaaattccagctccaattattccttacatctaaatattacccttgttcggttgaaaacatttgactgcttatctgattaaatatgctatctcttgattcccagtgttgaggtcggttgcattgattggtaaaattcctggaatgtgaccatcattccttgcgttttgtcctgaaccaggcttgcgtaaaacagtgcatccccttctccctgttttagtaccatgagtggtacgtatggtgggagtctcgctcttagtgtttccaggcaaaccttaactttgtgtgcgttactcgatgtcgactgttccagtgcgagtggcacgagggttgcgttaagctgttcgaacgagggaacatcaaaggtactttgtagcaagttgttaggcacattcattccaacccacagcaacaagtactccccattaaacagtaggtagaaacactcttgcaacagcgattcaaaggatagtggcaatcctacacaaattttaacatacaatgaaagatattcatatagatatatagtagtataaatagtataaaataccctgaagtaacaattcatgggaattgagttcgtttgataggttatagagttgggggtatgcgtacaagataacttgatcgattttgcagcttctgaacttggtgctgagatagaccctgtagtcctggttatggtcgtccgtgaacagtgtggttttgaggagacccagaacgtatagtgagagtactctggataagtctactgtagaacccagtattgacatactgctaattactcttgagcagtgtgttgttaggtgattccttgcgtcaaccattttcccgctagtttggtacaccttaatcgctcccaagagcatgttaaacaccaaggattcaacgtttacactgttaaggactgttcccaaatcatttgaaattcccactgctgtgttaaacactcttatccttctttctcctgagctgttagtgtgtaatagggcagtttggatgtacatgaccttctttccagctaaatcaatattatatttattaatatataaatattattatataatatggtatataaaaatagtatcatataatatgatattttgaaacctgagcttgtgttacttgagttagaggtatctggtacgaaggtaatggtgtagctgtggtcttcagaggttgttgggagtaccatcaggtcacttcctcttacgaaacagtttccgtgccagttagtaactttccagcccttgctcagcctgattctcatcacactttcccacactgttgttcttctcaccaagtgcttcagctcattaaccaacttgtagttctccgcgtgattcttatatggataataatatatgtttcctacaaacgaattagtaggttaaatatgattttagtaaatgtaaagttagaatgaagatgacaattacctgatgttaaagttgacatgtattgtaatttatccaagttgagtgcctggggagtacatacaaagaggtccagtgtggtttgtgtttggcacatcatgcagctgaagtctttgcacttttcaagtgggtggatcttggacgttggcttcttgttcatattcagcacgttcgatgattggggtgccgattctgccttttgtgcagacgttattgagaagtctccaaaggtacatggtgatgctgcaaatacgattagctttcctccgacgtgtttcatcgagtaatgtgcgcttctgattgcactcccctataaatcaatataacaaccaacaataattcagaataatgagtatgtctagaaatagcttaccaatgccgatcctgtggttgttgtgtttttccacaatgatggcaataaatctaacatacggaggaagtcctaaacattcattatcaactgctttttattttatatgttaataaacacctgtgaggactcttgtaggtttaataaaacctctcctggtaatgggaggaacaggtcttccaagtcagacacaatgaggagttggtagttttgtggacccttggaaatttggtagaaatgcactgtggagtcaaaggtcattagacccacgagtgtgcgattatcacacgcaaattcgttgcccattatcagttcctaaatgatgtattaaaacagtttaatattaaaagttctaaatatttaatattaaaatgtgatttaattgtattttaaaatggtttaaattctaaaaaacgtactttgatggttttacaaacaacttctagcattcttgagtttactgcgttcgaagagacatcgattaggaatagatacgatggtggctgtggtggtctgaccgtatagtcagctgaggccatgaactctactactccacaactcaactctagctcattttgttggtttgatcctgggtattggttaaaggacgagaggtatctattctggagttcatttgatgtgtcacataggttacagatccagaaccttttagaggggtctgttcttacaaaggggtttatataagctctgcattgtttacatctagtgattgattcatttccgtggtttactaatggtacagtttcaactaaaacatagaattagagctttaaaatttaatttttaagtaaaaatgcgtaaaaattacctgaattgagtggcgtgattgtgtaagaaagagttataccagatttttggtgcaactgatctgttgaggggagtgttcccaccgatagggaaacaaaattcttcgtcgtatttgccaaaacaacggattccaaaacctcttcatccgacttgtatcctactgttgaagttgcggagaagttatcgtggaacacttgaccagtatgactcttagatgtgggtctcactgttgtcacacctagaattagttattaaacaagcttatgtattaagtaagtgaaaaataccttgaccagattgagccttgttgagctcctctaattttggtggtggcactggggcaggtggaggttctgaaaaggctggaggcacctgcgaagagtactccaaactagaggtgaaatggacgctgggtggattagcgtatgctgcgtttccaagtccacttctatttactaaccctatatatatgtaagtttagagatatattttatcatattgttagtgttagttatgagatttttaatacctgattgatttggattataaacaggaggcacgccagggccaggtggaaattgttgacctaaaatttttaaaatttagataaaataccaggaaaggtctgaggtaaattatgtgcatatcctccagcggttggtggaggatttactggaggatgggtaggcggatgaaccggatttgcgaatggagtttggtgaactgggttttggacgttaggaaaaggattcgacgtccgactagttaaaccctgtttgggatttggccaatttgacgccatctggtattagattgatttaaaatataatgtctgagtataaattaaaataaacttggatgtatataacaaaatccaatttaccacataagatgaacttatcagacctataaatacatttgaaaatctattgataaacttttaggtgaaaaatgaataaattattaggtctaaagtaaaaagtaattgtctcactcgatcttctaaagcccccagtgtgttaattatagtaaattataaattaacactcttaacaattcgacctaataaacatttaaaattatttacaaaataaatttatggcatatttttaaatgatacttaaaatttatgaattgatttgcgcaatttcttcataaacttttactcaagtttttttaacttgaaatcatatttccactttatgaatataaatttttgttaattgtcttttgtaaaagtaattaagccaatgtcacggtctattttatttcaaattatttaataccacacatttagttaaagaattattatattatttaaaaattgagattcatcgcatatataactattatgatagtttatctgtaccatataatgttttctattgtaaaatataatataatttgggatgattccatataattcactgataaatgccaaagattgagagttcaggggctttgcgcaaccctctgctatttggttggaagatagatgacccaaacaatgataacttactgggatgtgttaagctcattgaaagtttaggaatctcgtttttggttttggatttaaacactctgtcagctaaattgggatcgaatggcgcatttcaacacctaaatcacgtagataactctgaattttgccattcagaagagtttaaactattaattgggttcagtcccttagggaaaagtgatttggctctccctaacgagctctggtcacagagaattgtatcgttcattcagactagtgattttaaagtactcaaaactcaaattgaatggtcctgttatgtctcatctcgctttattatgattgatctggagtccgtattatcaaattcaccaattgatatggttaatagtgtaccgggtaaaacctctaatagtccaaatcatagcaacctagaatctgatagttatgaattaatggacaagttggtgctattttgtcagattctctcatcatatttaactcagcctaatttgccaacagtatgcatatcattggactgctgtaaagactccttaaatacatggaatatgatttacgaactgtgtggttatagtgataaggtgaaagtgtgcctaaaactccaaccagtggaaactgatattgaaatgtggctttctgagccagtaaagtgtgtagttttatctgaggatacattcttaagtaataaaagggtaatgctaaataagtcagtctcaaaccaactctcagtactgatgaaaaataatgtgaaaattgttttagattctaatttaaactataacagcctcataagcaatgattgttttattcaaaacaacaatgatagtggtaattttgtggaagaggttgttatgcgggattttgagagtgaaattgatgttaaagatgtgttgaaggcagttaaaagatgttactctaggattggtcctttgactattaatgaattgtatggtagaggttatgaagatttacttcaggtaccacttcagccactcagggataatttggattcctcaacctataacgagtttgaaaagtgttctttcaaatacaactgctacgatcaagcaatttcttcctttatcacaaccaaacacggtgaattgaaccaaccaaataatttaaacagtaatattaactactcagtatatgtgttgggagccggtagaggtccattggtggaggttgtaatggatgttttcaggagaaatcacatcccaacgagtgatttcgtggtatatgctcttgataagaacccctacacaatgttaactttggatcataaagctcagagtaataggtgggcaaatgttaggctaatttgcaaagatatgagagaactaaacaagagtatgtttcagtccaacggcaacagtgggtctaaaccagttcatttagtagttagtgagttactgggcccgtttggtgataatgaattggcccctgaatgtttacacggatttgaaaggtcatttaatttactttttaataacagggtaaggcttgagtttatccctagtagttacacttcatatgtgatgccactgcactgtcctcaaatttgggcaaaaatcaagtcatttgggaacactaaaaactttcatatgccatacacagtttacttgaaagcatattataacgttggtaccatgcatatggactgctttaagttcgaacaccctgatactcaaccccctaaaagagaacaaattcgtgatcttgagagatataaagtaatgaaattcattgctagaagtgattgttatgttcatgggtttggagcgtattttaagtgtactttatttgataaagtggaaatctctatactcccacgagattctgaaaacgttaaaagctggtttcctatgttctttcccatagaaataccgttcccagtaaagaaatctcaggtaataacactccatatttggaggaaggtcaatgatctaaaggtgtggtacgaatgggcctttacaaccccttacacaacagcaatacacaatgttaatggacactcatatagtatatccaagtgttaatctatttaatttgttatgtatgattttaagtgtatgtatatattgattgtgttataagcaacaaagtctttaaataaaaaattgtgaacgtggaatcttgagggtttatggaaaagaataattaaccaagtgtgaatagctgagaaatgtgtttagaagactaatgtgtaagtgaattaaaatttttaatgagtttaagttggatcaataattaatatttcagttgcgacgttgtaggacccgacttagtttttttgacagtttataaaatcttgtcggaaattataaaatataaatatactcaataaaaggtatttttattacatatcatgctttatctctaaccttctctactaattctcatatatttagatctttaaaattatatttcctctgcactcatatttatttatcgttatttgaggaatttgacatatataagtaattaactaacgttaatttattatcagatggaatacgctaaagagttagtagaaacagcaaacaagctggttgcagatggcaagggtattctggcagcagatgagtctgacaacacaatcaagaagcgttttgatgcaataggacttgaaaataccgaggaaaatcgagcaaagtatagatcgcttttgtttaccactcctgacctgaacaaatacgtttcaggagttatattgtttgaggagaccatgtatcagaaggatccaaacagtgataaaactttattggagcttttgaaagagaatggactattggtgggaattaaggttgataagggtttgtttacactccccttactaggagagacgaccacaaaaggtttcgacgacctttatgaccgcagtaccaagttctacaaaatgggagcacgttttgccaaatggaggaatgtgttgactattgacaggagcaaaaatttgccttcacagttagctttggaggagaatgctcagaacttggccagatatgcgctggtgtgtcagtctgctggattagtgccgattgttgagcctgaagtgttaatggatggaagccattcagcagaggagtgtgaaaaggtaacaactaaagtgttggttgaggtgttcaaggcacttaacgactacaacgtacttcttgaaggaatgttactgaaggttaatatggtagttccaggagctcaatatagttcatctggttctgttgccaacgtggctgagttaactgttagatgcttactgagaacagtcccagctgttgttccaggagtagtgttcttgtcaggaggacaaagtgagctggaagcaactaagaacttaaacgatatcaacgaacgccttctaacgttgacaaactattcaaactctgaaactagtgataacaggagcagtaggctttggaagttgtcgttttcatatggaagggcacttcagagtagttgtttaaaggtgtggagtgggaaggacgaaaacgtcaaaaacgctcaaaaggttctacaccaaatggccaaaaataactcactggcagcccagggtaaattaaccaagaaggatcttgaggaggttgaaaaattaaccaaggatatggttaaatcaaccctgtacgaaaaggattataaatattaaatgcagttgattgtatcagtaatataactatatgttcatttatattttacacagttgaattagattccagttgtgtggtgtacttgtttctaaaatttattagaatcggtacaattaattatttctttcataatgacgacgccttcagatgatccagaaaaattaaactcggatgcagatgccaggagactcgagaatttttcgatacaggaactgaatatgcttattttaaagcttgaagaggtaatttaaatttttactaatattgagttattttgtgtttaaaatattgagaaattatttacatttgttttcacttgaaatttaggaagtaaatgagttgcaaagcctagttaacgcactaacgatcgcaatggagagattccaggaatccaagaaggctttgaccgagttggagaagaaaaataaacaaatccaagttcctctcacttcattagtatacgttccaggtaatatatattgaaattattttcatatttttcccttaaatgcctcttatttatgtaaaacctccataaatatttaatacattaattttcaggggaactgactaaccctgacaaagtgttggtttcagtagggactggatactatgtggaaatggatttgaaaaaagcagaggattactatgagaggtatactacacatcagtcgtatatagtaataaatattaataatgaatattaaatgtgtatattaggagaataaggacagttgaagaacaaatgtgtaaattgcaagctattttatctggaaaggcgaagcagataaatttaagttattcatatctggaccagaaattggccattttaagaaacacacaactggcagcccaaactacaagttgaacgacttgcacacctaaataaacagttttaaaagtttaattttaaaatattcttgtctaattacgtgtttatttgagttttgcgtttttcgctattttttgtgattctgcacaacacaacatcacgaaaatagtttttactccgggtacactatttttaatccatctattcccttggaatggatttaaatataaattgtttgcgtttctttggttcgttgtggcctaaaatgaggatacccacctattagattgatggtgtttacgaccacaagctgtcaataataatctacacctaataattacaccgattagataccttgataaagttttggacttcttaaatatgggcggggtttggtaaaatggaaagagttatagaaaagtataagaacgaaatcgttcactcagttgaagagtacaacgtgcttgttctctcaggatacccagatagttacatgaactcctttgttccgttttacctgtttaacagaggtttcgcagaccaagttaaacagtcccctaacccccccaaaatctgcacagttttcaataacaaacaagacgtgctttatttcagtgacctctgctcagcactagtcaatgataaaaccagaggtatggagttattttaattatataacccatagctatataataacaattatcctgattaagtatgtacatggtatagtgtaaattataccattaggtatccgataagacattttatttgttcacaaaattttttagtaacaacggtatttgacggtaactccaactatgataagaagagcgaaattgtgtatacgacggacgagtacatactccgaaaactactagtggatcccctgctgtcagaattctcggtcttcatattgtgcaatgttcaagaaagagcacttaacttggatttgcttttggcacttttcaagcgtcttttgaatgtacggaagagacttagacttgtactcctgtatcagtccaccaacgttaactatattcttgagtattttaagagggaatcgccaaacgggcctaatgtaccagacgatattccaactccagatttcttttttggagaattcccattaaaagacgtacactacatttatgtagaaaatgaattctcattctataaagttagttacctgtcaaagccaacttccaattatatggaatcactcatatcaacaggtgtgtcatgacttaattacataaatcacatatatatttcatatgcataattggtttagtatatgacatatgtaagaatgagagtagtgacaatatcctaatatttgtccctactcgagagcacgcacatatactgaaggctgaacttgaagaacttgcgaatcagttttcaagcgataaaggtgcgattaacgttatgtgtctgagagggaacatttatatggagaataaggaagacgtcttgagaaacattttcatatgcacagacgtgaacgattataactttgggatgggagaaataacgtacttggtggacagttgcctgaccagacgcctgtcatcagagtacttgaatactggaatgagcgagaacataacagcctcaaccagagaggaaatgatgattaaatcatccctgatacacaacatacgcagaggaatatgctatagattattgacgcaaaatgattataattcaattatccaagtaataatttatactggttaattatttaacaacgctgtagtaagttaattaatttttaggagtttatagtccctgaaatcatgacgaaggatctcacgctgacggttctgttgctgaaatcactgggaatttccaagttgaatgattttgactttttgactaagccgcccgcagaatccctcaagcactcgttattcacactctacatgctaggtgcgatagacacttccggtgaattggtctatccaataggaaacttgatggctgaattaagagttacaccgtatctttcgagctttttgtatcgatcagtggagtctggatgctcagaggaagcactaatcatctattcaatgcttcaggttctttcccattggaataccttaaatatatataatttatttataaataaatagcccttacatctcaattcgtaacgttataataatatttaggtgaaagaaattctatggaagaagtctagtaagatataccgtaatgatacatcttactcaaatgaccgtttggaaagcgcaaagctagctttcgcagccctggagggtgatttggtttcatattttaacatgtttcaactgtcacagtattataaggatgaagatgataagtggctgtcgacacacatggttaacgaaagagcaatacaaacagcccagagaataaagaacaagacctcaaagttgcttgaaaagtacaatctcgagaccaccagctgcgatggcaacgtcgaactgctcatcaagacgatattctcgagctttttcctaaacgtggcttgcaaggaacatttgatagtaaacttccaaaactccaaccagatcatacaacaccttaaggccaatcaaccattgaacgcctcagatccaaaaagagaagaccaacagccatatgtcctagttaaatcgtaagaatttacttaatcctatccttaaactttgatctaaaatacttaattctgtatcaaaaccactttcagtgtgtgtttaatttgattttaggtatgaaaagtttaattataagccattgtatattcacccgtcctcatttattgtcaatgaacagcctgactgggtagtatttaatgaatctaacaccattgatgggaagttatacatgcatgacataacaactataagaccagagtacctttaatacttagctttatgttctttaaggaacgccttacacatattatggttatattagttgctgtttgttgaattcggttgattaatttttaggtatttgcaagaactggctccacattatttcggagattacgacgtcaagccctatttggagacttgttaaaaattttaatcttaaccttgtaactttaccacaactacacattagcattgtttgtttatttgtatcataaattttaaatttttattattttgttaattttatgtaaaaattttaatttatccttgtttgatggtaaatatgttgaatttattgttagattatcaatgttgtcggtgttagctcccctggtagcaaggtcgctggccagggggactggaatctcgagtacaagacttttgctcttccaaaatactataaatcggtgttcaatctgtttaaattcaacaagtagaatcccagttcatgacagtagaaaattatcagagactgaaggacacacagaagataatagtataaaacacaacaagaatgtggaaagaaagatgataaatagtttgaattataatgcaaaatttgccgattttataaggaaggacaccaagccagatgacggaatgggttatggcctagtggcactatttatcgcaatgtttggaatctcatttgcctgtgttccactatacgagtacttttgccaacaatcggggtatctgggaaccacaaagaaaacaaaaacatacacaccaccgcctgaaagtattaatatttactataacaacgcacataacactattaaaaatagtttgctagattgcattaatattgattagatttgaatttgagaaagtttgaaattgattttgtgactcattctaacctgaattgggagtttaagccctgtcagaaaagagtagtggtcagacctggtgagactacactatctttctatacggctaagaacctgagtaaagaacccgttataggtagttttaatcttcataaatttgaataggagttgctgcataccatgttataccggatgaggctggactttattttaataaaatacagtgtttctgctttgaagagcaattactaaacccaggtacacatgggaaattgtatttaaattttaggagaggaggtggatttacccgttcttttctttctagatcccgaaatcgtaaaggataaaaaactacgtaacaatttattatattagttatatatattcacaatttagtttgttaaatgactcgaatgtttagatggagttgataagatcacattgtcgtacatcttctttgaagctaattctgaaataccgccagaatataaaagtttatttaaccagacgtctgaacccataaaaaatagttgactgtctatttctaataagactaattatttctaataatagtgatattttaagtaaatatttttatgtgctgtataacattttgtgcaataaattatgatttcttggtgcaaaagtatattatgagagctatagcaactatagctgcaattcctaaaacgactgaaacgattataacctgaaattttatattaattgaaaacacaaatatgtaacaaagtatgtgataataaaatactatgttccttggtcttgcataaactttagaggcgttttttgaggcttcaaatgcctaaatatgagttgtagaagtttgtttaaaggattataatatatattcatacttcaattgctttccccttaagaacctcagaggtatccctcagtaattcaacgtttgcggtactttctaaaacatgaaacatactctcctttatgtgattcttggcgtgttcagcttttaccttgatctaaatttaaattaactattaaatccaatttataattattaatttgataatttagtgtttaactaataattttgaatattgtcgttaccaaggtgacgtgatctttttcaacaactgagtcgtatttatagaaaatatcttttagtttttcttgtaacgtagattgcaaacctagtacaggtgagtcattttcataaccacttgataatactagcttaattaaatcctatacaaaatttttatcattattcatacaatactgtaatattttatacaataacattttatatgtacagtattgtaataattatataatatataaggtaaagtaattttaaaatacgtttaatatggcgttggcgaaacgtcttggataattttctcccaaagttaacaaataagctcccattgtatcattatcgtatgagaggaaatacaaagttgctccctcgagtactatatcggaaacatctgaatcatttatttagtcaaaacttagttaatttgactatgtgaattagtttatacctgtcttgccctttctaagtgactcaaatattctgtcttttgcttcagtaatctaaaaattaatcataaaactgaacttaaactagttaagtaattaagttatgatttgttacaatcttttcgtatattatagggatcctgatagggtaggaaaccacttctctggcctgctctatattgacaaaggccatataaattaagttgtcgtactggacatccattatgaatatttaaattaaacataaaactttaggggtaaaatgttgagtactaatgttaaattcataaaattatagctaattttattaaatacataaaaaattatttccttaaaggaattttctacgagaattactagatcaatccgggatggtaatatggtcatggatttgtcaaactaggttaagtattgttataataatgataattaaacaagtaatttgaggaaaattttggaaattgaaggatttaaggtgttgttgttagatagccagtaaattttcctttaaaaagtaatttacagtgttttttaatattttaaggtgtaaacatttgtcgtttttaatttaataagcaggaatcagtttgtagcaagtttttgttcaaatttaaggactcagaggtgtgcggctttacacatgagaaaaaatcaacgaaaaactgaactcgttgcatatagttctcgtatttgggctcaattttaaaaattttaactaaaaattgattgtattcaatgagattttccagtttactatgaaattcgttagtcatttccttagtgatctctgaatgtgtaagtgatgcttcgagattcctggtcttcttacctaaaattaataaaaggtcgttccattcatgttcttctccaaatatttgttgagttgtaaaggttaaattttttaaattggaaagagaatgagagtttgggtctttaagtctagttatatactccaaagtaagaatcataacacataaacaaattgattctagctttttatacttgttcagagcctcgttaaagtcattagtctcacacaacttatccccttgatccctaacgttaagaacggatttttcacatagactatcactgatcaagttagatgttgatatttctttggatgagaatggtgaaatggaaggcctatctgttagaaattgaatttcataattcaaagattcaataagtgatgggaagtgaaacttataagcacttgaaaatatagtgaaaagtgtgtgtatttgagaagtcttaaggcttcttattaagtcaccggattccaaatgaataagactattctggaaaaaattgttagaataactctgtctcgagttaattaagtataatatttttataagtttttcaggtttgagtcctgccaaacatgactctagtctataaattgaagtgttaattaagtccaacttaaaagggtttgatattctcctttcagtattacctatctgtaaatctgtttcaagtgtcttgagttgtcctttacttatctcaacctcagcatcatttgaagaatagtttacatttttgaacagactactttgcctaaaattatattataaaatggataaatgtatttttaatattactttttgtgagtatatctggaaatttgatcgtaaataagcagtaaatttgctatttggaatggtttgtgaccatatagcgactcaggttgttttgttattagtgagtgaagaacattctcaaaaagcttaagccaacttgaaaatggtattaatctgcattctctggaaagagcaattatcatataataccgttcattatcagttaaagtcttgttttcctcagattgaaaaaggtacttcagaagagttctttgacccttggaaatgattccgttggtctttaaattagttttgactacaggttccagtttgtcattgtgagaataagagtgagaactgttttcaacttgataatagcaaattttccctaggggtttcttaatcctcgttaaaaggtctagaattaatattaagtcgtggtttgagaggaaggaacactttgatactaaatcttctaccataaactcagtaattttctggtagtcaattgggtcttcaatcagctaaaatttgattatcaagtgtgtaaagtaccttcttttcattaaattccttgtttataagattattcgaattattaccattaataatatttgggtatagaatttggttgtgtagtttacagcggaatctaactcttctagcaaaggatttgatccgaagtaagatattaagtcttttattacagtaaaaatttgcgatagatgaaatttgaccagttacagttgacacattactgctcatgtgtatcaaattttaatgattccagcttcattctccattaaattaaataaaattagaaataatggtaattttagcatttatagtaaacgttttatagaagaaaatgttgtataaaattttatattatactctttgtatagcgtatagggagttgtttcctgtatatataactaagtttttttatatttaatatgagttattttgtattaaaatgttttattattataataacataatttaaacttgtttttaatagcttttaaaatgatttaatataaattgtttattatcgcaacttaaaactttataattcctgctgattttgccatttaatagaaattttgtacacgtaaagtaaaaaataagtttttttaatttgataaaagatgcctagagctgaggttggaacccacaaatggcttgcaaacaagatgaagtccaagggacttcaaaaactgaagtggtattgccaaatgtgcgaaaagcaatgcagagatgagaacggattcaaggtaacaaattcctttaattcttaatagcctttcatttcacccttaatattaatttttagtgccatcgcctttccgaaggccatcaaaggatgatgcaggttttttgccaaaattcaggccgttttatggatggattctctcgtacttttgaaaatgaattcatgaaactgatgagaacaaggtattttttaaaattttagccttgtttaccaaatagtctaacattgatatagatactgtaagacaaagatactggcaaacagtgtatatcaagagctaattagcgataaacagcatgttcatatgaatgctactatttgggtaactctatctgagtttgttctctaccttggcaggagtggcaagtgtaaggttgagcacacacccaagggttggtacatagagtacattgaccaggagaaacttaaaagagaagaagacgaacgtgctaaaatgaagcgagagataactcttgaacaaatgcaccagagacttatccaaaagctggttgaagaggctaaggaaagtggtgcctttgagcacgaggaagagtacacgcctttaatgaaagaccctgatcaaaagattgtaattaacacaaacctcaccaccacaaacagtgaagaatccaacaaaggactcaatgttttcaagcaattttatcgcaaaagtattactataataatgctatatactactagtaccactgttatagtgatattaataattgattagataaatctactatcgggaaacaagagcctgaaactcctaaaactgaaggttctaaaagaaaatcagcattagaatcaataatggagtctaataaaaagttaaaatctcaccatgataaagggctaactgataagaatggaactgcccaagaaacttggttatgtaatgacatattagtcaaaattattttaaaaactcatgaaatgtacaagcaaaagttcaaagtgatcaaagtttcaaagtaacacactacacatcacttttctacataatttacatgtatgctaatgtatttttagtaatacggcaaccttggatactgggaatggaactcttcaaatccaagacaaatacttggaaacggtgttaccggtaccttcacatatcatatagttgtgtggtattaatttaatattttagagcgtgaatgggagagtaaaactgttgaatggaaggaatcgaggccttattgggactctggtatcaactgaccctgacaatttaaaggcaaaagtatcagttcaaggtagtttagttcactgtacaaaattgaattagggaatttgatggaagtaacttacgacgatattagtcaatatgtaaaataaccttaatatttttaattttgttattatacattggtcgctgatttaggtattctcatagacttcagtaggtcaattcgcctataaaatttattcctggtaaaagttacccctgaagattctcgttatattcgtttatccagtccctaagtgttgtaaattgtgtcgactcacctcctgtgtctgtagtagttaaactgaccgatcttgttaaagtatctcaggtcctgttgtaattaatttacaccaatatacaaatactgatactaatcttgtgaggtacctttctgaaaagaaatcttgaatgggaagtgagatatgggaaccacttggtaacagttttagagtcaactcttttatcataaactgcattccttagctcagaactcatgcttttgggtacctaaagaattaaagttgatacttacaattataaagtataataatggcacctttccaagtataaaaatcttctgatagtattcgttcatgggcatttcacgtatcttgtacaccaaggtatttctccaagtacacattatcccaaaattccctaataaagataaacagtgttaaatatatataaaaaatcaaatggaagggtatatcttatgaagaaggtacccagagcatggtgtttaagttgtttaatgggacgtccgtaattaataattatgttgtcgatgtataatctgctgggatcgcctccgaattcttcatatatcttcttttgagactcactcagctaataaatatatgtgaccagtgtggaatgaggatgaaaatggataataagtcactgagttgagaatgcgattggttttaatgttggggaaaccgtttagccagtcaagagcatcttgaaggtgcaagtttgtaagctaatacagaatatttcagccattataaaaccagtttagagtataactttagtcttttaagacttattggtaagtcctggaccttaaactcccacacattgcctgaatcccttgactttatctgaaaacatttaaaataggtaagaaatactggaagctcttcgttgtcgtagttcttgggagtaataaacttccgacggtaacggttcttatttaacttgtaaattaacttctttcgccacctaacatatattacacagttgatcacggtgatatataattttggtagaaaaggtattaacaaactcccagagtcctttttttctataataagggttttttattccgcaggtcttgttggataaacctaaagttaaaataatgtaaaaagttagttaccagaaaaaaataaacgagggaagctgagattcttccctgttgtacaaacgaaatttgaaaaatatgaaaaaatattcataatacaaatactacaataattaagtgaaaattgtttcgaacatttaatagagaatgaccaaaataaacaaacttaaaccaaatcaatacaagttaaaaggataaattaaactaaaataatgagaaaataaaataaaagatcagattaggaaaatgtgtagattagtaaaagtggaaataggtttggaaggtcaagtgggaatgaaaggggataagatgtttaggaacattctcttttcgcgagtgttgctgaagcttaccgggatacagtttccattttcaagtaagtggaaagccacagttgtattatagttcatggagttcccagtggtctggattctgctcagctcatccttagtgtgtagaatcttcttcactgatgcaaagtcaatctctcttacctataatacattattcagcaaattatatatcttagtattactatataaccagtgttattatataacttcgtgctagtaaactatgtatttattgtgtatatgtataaagagttacttgtttatcacaggcgatccttacaaggctagtttcacaatttacatgtaaagtacaggataactttgtcccgtcctatataacacattttataaatatgagtaaataagtaagaaaatgtgtaggaaaatgtgtagatggaggttaatgaaaagggggtggaagaacccgaaaataatggtacctcaagtaatacgatgacatcaaggtagtcttgcagtttttccttaaaattttgttctaaaaataaatgacttggaattagaatgggaaatgtgtagaatgtgtagaatgacagggaaatcgtaaagtcaaagaatacactaactagactaagcactagggtgaatgtattaccttcgagatcctcgtcaaatgtttcctgtttagtggaatttccatgtgcgcaacaggagttgaagagtccgaaaaaattattgaaggacgttttaactgacattgtgcaaacgttaattcgttctttaaaataaacgtgaacttgtgattttaatgtttacttattgtagattgttttacgtaaatttataaatccaggtcaaacttgaaatttggaatttcatacacacctctgtctatgaaaatgggctttttccgtcaattccaatcaagtaataatgaaaaaaataaaaatataccatgaaaaaaaattaaggaagcaaaaaattaattattcgtaaattgatagttctacaagaacatcggcatttgacattatgcccctatgggcctgaaatccctacatgagaattattttattcaagttgatatttatgtaagaaattcttacatgtgttagtatttcaaagttaaagaacaaatttttggcttcctgtgaacttccggcgtaaagagttgataccgccaagttgttgagcaaaaccgactcctgagggctgagtgactttttatccagggaaagaactgatttaaactcctcagaagctcccttatagtctttactaaacatcttcagaaaccctgtgtaaggtagtttcctttcgtcagcctttcccagaatcgccttcaggtatcgctcagattcctcagtataacccagctaaattccgttgaatttccttataaaccttacctttctataaataagtgataatatcatgttggttgaaacatcttccttatcgtacttcaaatttacctccttcagtaactttatcgcctcctaaacatgtttattatatattattatatactatgtgttatatggttatggtagtatgggtaatgatatattttacctgtggtcttagtagagtgataagtacgtctgataaaagtaatactgttttcataatcctcttaacaattacttcacgttctttagatgattcactttcatctcgcttctcgtatgatctttgagaattcaaatcatcactgagtttatggaataagttgcacattctggtgagtgattggaaactagaacctttcatatgaggataataggcatgtattaaaaatgtactaaacgggcatactgaatctctaaacacattattatactatatatggtataatatatgtgtagagggtagtactagtatagaagttacttggtgtatgaaaattgagatttcagtttatctgtaaaaatcgactgaattaaatcaaagtcagagtcaacttcattaaaattctataacaatataatgttataacaagtgtaaaaaattacatataataaatgtgtgtaaaagaagaaaattactttgaggtgtaggttgtagtaaattcttatggtcaaaattgcgattagtttgtttggatcatcgttgaattgctaaaaatagaaataaataaactttttaaaaacaaacgtagaaattttctctcaataaattaactatttctttgtagttgttctcggaagagagtttgtttaactcggaaacgacgtctacatccttaaaatccgaatccatcgtaaactatggttaatctggatcagggtaataaattcattaattgggtacctagaattaatgaaatagattgaatgtgtaggaaaaactaaggtcttaagttccatcatggggtttaacattccttgccattcttaataagcgattcttaattgctgttgagtcaagttaatcggattttatgaattcacttttttaaaatctctactgatgccaacttccagtttttattattttaattaacctgttttcatttaaatacacctataatcaaattttctgaatcttccacttttaatcacttttagaatcttatttcctcttttgcttgtggcagataattttgacttttcctaattttcacgtttattcacaaatctccccaaattacccctttattatgatgcaattatcaattttctctctatgttcacgcaaaaaataaataaatatctctaatttcataaaatgcctccaagaaagggaagaacttctgtcaaaaaaggtatttttaattattcagagcaccattttataccaagttatattccccttagattcctaattatacaccttaatataatgttaatttattaaatttatattaatttatgctcagttttaaaagtcgagaacccggatgaattgaagtccgatgatttggaggagatggagcttgatcctttgactcaggatatgagttccctaaagtcttctgatctcacccatgagaaccttaacactgactctacttctgataacctagaactcaacaactcggttgacgttcaattatctgcaaacacagagctcgaaaatactaataacactatggatactactgttgatactactcattctgttgacaatatccattcagttgacaatattcattcagttgacaacattgagctagttgacaattttcacctagttgacactgcaaatgccggtggtacagtggtcacagttggtaatgtggatatggatgttgatatggaagggtatgttcaagatttatccatgtgtgacattcccccaccgccagactctgatggctacgggctggaggatcagatgtcaagtgaggaaatttcagagtatatttctgagataatggagtctctgatggatttatcgaagcaacttgaggaccaggacgatgaggaagaggagggcgcaataaaggaggacgaagtgccttttgagcgggtaccagaggaggtaaacggtggaaacgttctcctatttttgaatttaccgcctgaatttgacccgaagaggctgagtgaggtgtttacgaaatatccatcacttgtttcaaacgtttcattcctggacaaaacaaggctgaaggtttttttcacgtcatataaaggagctcaggaaacgaagatgaaacttgactctgtaaaattgtataatcgcagacttcaagtcatttacgcccctgacaaatacacactaaacgctcccaaatatttaaatattcctctaaacctcagtaatcgccatccggttgttaatcaccaccacaacttcgtgaatcagcatagtcacactagccatccaaatcatttcaggggatttggcaataacgctaatattccaccgccaccatccgctccttacacaggtcctcctcaagaacgctttaaaatctcgtttaacaggtataagctagtgaacacgaccatgtcccagatcttgactcagatttacactgaggcaaactttgagccgggaagtcgcagtctccagtgggacgactcctcacccttctaccagaaccagctgaaatatgacaggttatttgaaaagttcggtataactactaggtatgtcatgattggaagattgaactactcagtatttgaaaactccagtactgtccacgatttcctctcgtccttcacaaactcatcgtacacttatgaaattgtcaatttgccctctagttatccttcaagtccttccgtgacagctgaaactacctcactcaacagtgttaatgttgatagttttaatggttcagacggtgagaaatggttatatgtaatatttgataagaacagagacggattgaacttttacaataaggtatatagctacgtttcagcctcaagttcagaagattcaagtgaagtgaaacataagtatttggtgagatatgcatgtccactgtctcctcaagatagtttgtggataggcaacgtgtgtgagttttgcggctatttcagaactgaagatgaggtctactcgttctttaacaatttaggccaacttaagcatttcaaactcgtctacgagtcaaactgtatattcctaacctttcatagtaaacaaacctcgataaaggtgtataacctcttaaacgcactgtctccaaggatggttatcaggcttctaactgcaaacaacgctaatggaagttcaaatagatcaagcctagttgacaggttttgtagcttgacaatggatgttgacgagtcaatgggacttatgaaggaggatttggtgactgttgactttacagtaagtaagagtgagaacagttttgctttgggtcagaagctcttgaacgccataaagaggagaacagactcacaggaactcattgaaaaactcctgaacacaagcgatgcttcaaacatcctgtctgacaactcaatgtcaaatcgtagaagtcatggcggctatcccagctataatagttacgggcccaggagaagggagccacggccaagatatgacaggagaccctatagagatgactattccagagagccataccgtgacagggacagaagtaatcgcgaacacaacaagtatagacagagatatccgatttcaaaggaaccaagagttgaccgtttcggaagaacaattaggccctacgataagtcgagacgtgatgaaccttggaaatataatcaacaccaagctgattctgatagtttccaggacaagttggatcatgaagttagaaaaagaagccaagaaagaggaatggataccaattacccagaaccgcctaaaaccgcccaccctagtgaacgatatttatcagaacaaccgctcatggatcaggttgagatggagattgatcactcagatactgcttcaagctcttctggtaaggctgagagacctggtagaagattagaatactgccaactactcaaaagaggcaagttcatttgcaaagttggttgtgaatttattcgcggtgacaaggctcacaggttacctgagcttctcgacgttaatcagagggctaaccctgagcgtttgaagaattacttgactaaaacacccgaactctcactttggcagttatctgctgatggtaaggaagataatcagaagtatgacaatctttgcgaatacctgatttccaaaaacagggtcgcacttgttcagcaaggcccctatgaaatctacatcgtacctccccaagaacaatacattcaaatgctaaacactccagatacgcaattcatgtacgcttatgtcctctctaagtcctaatttgcctcttcatactactcatacgtttatacattttgtatagtagtatgtgtacaatagtgtattttctaccctaatagtattgtatagaatttgtgtaatatgtaggatcttagtgattaaccgtgtttggagcgtgttttgatgttaaatatggttagatttttgatttataccttgtacacacttcttaaattaatgttagggattagaacccccataaattgtaaaaccacatgataacagcgtaatcttgtgtaaaataaatatgcatgtactagcttagattggtaggtatattacatatagtattcctgtgagtttaaggttccagtgatgtgttctattatatccttaggagtaccaggcgtgctgattagcctattaatctggtctagcccagcctggtacttggcactgagtgacttattaagtttatgaacaaactcaaacttgatcccgctcaccagtaaattcttttcagcaaagtatctgttggtgaatttagggttatttggactgggatttttggatttcccagtgttaaagttgaaatacaccagacaccacaagcagggcatgttgttcttaaaagtcaacatcaactttagtactctttctttcacaaataaactattctgttgattcactgttccgttagatagactagaattgcttgaatcgccagaccattgcgatagataatagtagttagtagagagttgtgtcaagctgtggaacatattcaagttacttacgaatttatgatttatatcacgagttagttccattacatggttaagcaattctaccagctgaacgttttcaataacatcctcagcaaattccaccattttagagtttaaaaagtggttataatactgcacaaggtcacttttaaacctgtaatagggcacgtccttgtgcattggacagtataatactaactttagatcatttctcacggtaaacaaatcgatatagttattttcatccacatccaagtttataacagtctccagtgagttatttttttgatactgttgcccattattggagctgtgtgtattattaaataagttacttgtggctgggttgtggtttaccgagttagcatacggacttaggtttagattatttgagcttgtagaacttgagcttgaaatagcaattgggctaagaaaattattaaacactgtgttattcagtgcgttggagctactggtgtttgagttctgaaaccataaaaacaacttaagttccaagtcaggaactagtttaacaggcttaaagggcaggtgatccaaaaccctaagcttatctaacatctcttttgttacatctggaaacaattcatctttatacaaagtgttattgtttacagatttattagttttatccagagcgttggtatttttaggagtattaatattattattgagtgtagcggtgtttgggggagaaatctgataagacttactgactttggtataatagttgaagttgaaaaggtataaaatattttgatatgagttgtgatagttgagtggtagtacaaagaaaccagtttcattatatatgtcttcaagtctattttccctagctaacaaagtttctttaacatctgaaaccttggtgttcatttgagtttgttcaagttttgacaagatttcacttcttaatagggaaatcccatcaattttaagtcttattgagtctctttgtaaattctcatgatctttgtagttgttgtaaagagtcaaaagcctgttatttaccttcattaaggtgagaaacccgtttctcgtaagttccaagttataatcgttattttccagggctaaaaagtcatttttcagcttcttctccaaaacgtttaacttcctgagaatttccaagaatttactcataaacttcttagtgcctgtgtaaacgttatgttcatgcaagttatctcccacggctattttaatacttcgcaaacaactgaaaaccaagttaatacaagaacttgacatcactgactctagtccatgatagctttcagtttccaaatcaatcttatcactatcctcaacattggcagttgtttccttatttttgaacacttcctgaatctccttttggtttgattttctgttatctacagtatccacagtgtctgcagatgagtcaaatgattgattaatcaggtgtctatgcttgttgatgaaatcctgaaactccacttcaaattcacttctgaaaactgcattatctgcgttattaatagtattattagtattatcaatgttagtagtattatcagttggttgagtagatggaggttgatccctatttgggggttgagtatcaaacacaagggcttcacgggctgaaactagatcatatgcagagtcatctaatgagttggttgagtctgtagaaagaggtttaagatctactgaggttaaagttgaggtagtggtggtaggatcctgactactaatagacgagtatgactttaggtctgagatatagttgtaaacccgctctgagaaacaggcatacttctcatctgtgtattttgtacccttcaaatcagcctttagcctcttacaaatctctgttattttttggcttttcaagtacttttgcaactttagactatccaactcgtcttcagattccataactacgtcattttctacagagtcatggtttaccgtgttaaccatagtaccacaaacattatcagtgttattattagtatcattgttggtattagtataagtgttggttgtgtttacaaaggctgaagaaccagcggcgtcaaaacttacgttacctgcatcaatctcagtcataacattgtcaagttccatttctacatccaactcagggtcttctacatctacaaccatactttcctcatctacatcaacaggtactttatccttataactaatatccacattgtgattagtgctaacagaattattagtattagtgattttatttgagggttcgttttgattctcaagtgataaaacgtaaaaggactcataactgtcgacagatttaaactcgctgctcatggcttcatcagcgctactactattagtggtattaacagcttcacgcttaggggaaatagtgttctgaggagttaatctaaagttggaagggtcaaaatcgtcaaattcttcatagacagaagaatcactagttatagattcaacgtcgtacaaattattatcctctaaaagctctttctctttatttgcgatattttcagaactccaagatttagatgaagaggtagattctgaaacatcaaacgtttcaaccacctgtttcattccagagagcgtcattatcctttattcaaaattaaggtaataaacaaaaaatgtgtaacccagtttaatttacaaatattttcctcattcaaattaaaagaataaaaatataattaaatcaaaatcgaatatgtaatactgtgttaccacttgtgatgtcgacacaatatgattttctcagatttataaaaattagataattaaaattataatctttaattaaataatttttaaatggaaattaccaagtatatgggaaaatttactaataaatgtgtacaatatctgaataaaacatttgaatttgatattaagaacaattagtccgattcttttaatttatttacatgttttcatttttctttctcgggaagagctcaaatattagtccgaataatttttcttggaattcttcgaggagagaagaatccagttcttctatgtttacgctcataaaaatcccccttttataaatccttgctaaaaaatattattttaaaatttggttaaatacctaatgtgtttgcgatttcggatgatatagaatccaggtctcccaaaagtgtcgtcccagaacaatctccatcctattaaaactttattttaacaactcaaaccaactatttaactctttaaatacagtttattataatataccttaatatttttaagtggaaaggaacaatgcaaatctttacaggtgtagttattatcccctacccagaagtaggtactttttgtaaaaacaactgcgataaagtttaagtttatattggaaaccgagaattgtctcctgaagatttccatcaaaaaatattttacaacttctttcaactgtgtggcataatctccacttaacttcattaaaataataaaactatgaggtataaaattagttttaaacactccttttaaacaatatttatataaatgtatattattcactttattataaaatgtgttgatgattccaccttttttagttttctttatttttcatcttgttcttgtaagttttaaaccttcttttgaatatatcggaaacacaccttttagtaaaaccagatatactttatacacccctagaaatgagacattttcttccaattccaaaacgagtaaatttacacttggttcaaaccagaatgagcctgaaggggaggattttcagtattatgagcacattcctgttatgttgaaagaatcaatggaataccttataactgaccccaaagggttgtatttagatgttaccttagggtacggaggccatactgaggagattctaagacgccttaaccctaaagtatttttaatacattattacactgtttagggcaaactcatatcaattgacagggatccagaatccgtttattttaacagaaaaaggctaaagagttacattgaagagtcaagattatctgtagaaattggaaagttttctggcataattgatcttttaaagtcacacaaattacctacagagggatatacagggttctttttacccattttactatttaaactagttatatcaactttatatctactgtataaagagtttaggatagttgctgacttgggactctctacacatcaacttgaaaactctaaaagaggatttagttatatgaaaaacggaccactggacatgagaatgtcaagtccccttaatgatccttttaatcctaattttaaaattgatgttaaatcctccgaaaatacagcctaccaggtacttaacaccccaataacaatgttaatttatgattagttggttaacaagtctgatgaatctactctgaggaagattttcaaagagtttggacaagagccccgtgccgcatcaatcgccaagaaaattatcgaagtatcattaatagattttattatttagttaatattaccctataaatatttgtagaaacggcggattctgggagaaatcgactctactgagaagcttaagagtgtagttatggactccttaccaatgttccacaggagtaaaatgagaacactttctcggatatttcaggttttcctaatacttttactattttacatgatgtaatataaagaactataggcgctgagaattaaagtgaacgatgaacttaatgaactaagctcttttctcaattttattcctcaactccttaaatataatgggagatttgtatgtatatcctaccatgccctggaggaccgcctggtcaagaactcgttcataaacctaagaaacttcaaaactccaacagtcaagtttaatattttaaccaaggtttgttttaatgattattagcctttagaaatgtatatcgccaacccctgaggaaatagattcaaacatcaggtaaactcgtattgtgttaattttatttaggtccagaacagccaaattaagatgcattgaaaaggtaaaaaaataactcaatataataaaactacactatatatcatgtaattaaggggaaatttgtaaaaaatgattatgcgattctgtatataagatgtatcccggaatcagtttcaaccaggtcactaatctcattaaccttgaggttaaatgaagcttcagtaaaaggtttttgcattgtgtttcgatcaaagaagcctaaatcacctcctttccttgcacttgaacactcggatttagccgttgcaagtctcctgaattcttgatccaggttttcagatttcctcagcatttccaaataacctttcatttcattcaccgcttcttcttttgttctcgttacggccattccagtgtttctattcactggattcctagatccagtgtgctttagtaacaggtgagcacatcgcaccttatccatggtaaacttgattattgtattaattattttacagttaaaagtatagcagggtttattcctagaagttatcttctacagggagcttgtttttttgctctgattcttccagcgtatcctgattttgatttcatataatccgttccgtttaaaagtctccttcttctatttgatagaaatctaaaactagttttattccacaaaaaatttagaaagcaacgaatcatcacatgttaggaatatttttagaatttcttagtattttcaaatgtgtggtaatttaccaataaaataacacaattttagagttttcaccaacacattgggttaattttaataaatattattttgtttatgtataatggaatcgctagattcctcatcggacttttacctatttgataggctgtttaacaggtccttctcagaatattggaagttattctggactgattatgactttagcaagtataattcagtcagaaaagaattaactgaatgcttagatttcttacaaacacattcacttcctcaatatttccagcatgaatctggtaatttactactatctactacaaaacttagtattctagttaataaaaactttagaatctccaaaaggtgatagtactaaagaggagcctgaatttcagaagaatatagagagggaacgactgaacaaacttcgagttgttgaagaacttcaacaatctttcgagcttctgagcatgggctgtattcactttgacctgatttctaagaatgagcagtttgaggatgtccacactgagaacataaagtatcttatgcttccttatttaactgctcacgtattagttgagaaacctgatatgcaaaatcgattctctatactaaaaaaagtccaggtactacttcactaaattctttcattactaatattgagattagatttatttaattgagtttatgaacacgttgtcacaaatggatcttttaaggcctgacgagctccagttatgggagactaaatttgcgaaatcctcagaacactctggaataaatgaacgcggtagaaagagtgaagacattagaaatcttagaataaaacaagcatcatttgaacgtgacttgaagaaatcattatctgaaacattcctgtcctcaggatcagttgaacggtttttacaattcgttagttttttcccgtttattttgtgtagagattagcggaggactctgatagggaagagttttatcgcaacactttgttaagcattttgagattattttcaatacaatcccttaaccacttgaattccattgaaatggaactaccttttattgaaagacgagagttaaacaaactcgccttttcagatggtacacaacatataaatagtaataaccctttagagcctaaaattgatgtcaaatcctcctcttctaagccttggtttttacatattgataagaattcaaaggttctatctcacttatcccacttaacccagctataaactttcatatctctctataatttttagctggatcctacactagttcgttcattatacaagaggatggttttccttccaggccatagtaagattttgtatagtaaaattcatcagatttacccacaatttctctggatgaatgcgcccgtattgagatggaaatggacgtgtaagttagcatctgaatgaatttctcagtaaaacaatcggagtaaagaatcgttccaaaaagaagtattcttctgataactctgaaacggtatcaccttttctcattttattcttaggagtctgagaaatccagtgtgtgcactgacgaggagaggaactgggatgactggaaggacgatcacccaaaaggccaaggaaacaaggacataaacattggataactcaccacatactatttatcaccaataattaattttgtgtaccatattatttataccctaattttcattttatcccacgcggcaatgattggtattcttttactgccactcttttggtacccagacctaactcattataaacgccaaattatattattcatgctataaatgtgtaatttaatacctagcttcgttttctatccttatcatcgttaacaggttctggagcttctcgtcaccaggatatctctatacccattcattaccaataatacattttatagtatataatacattttgtagtatatagtgatgatagtatataactgtgtagtagtggatagtggagaatacgttggagaaatgtgttagaatgagttttttggctttaatttcaccggcaaaccggcctgccatatcaggcgttgaatgcccaaaactggcaattatactattatgaagagcagtccaattaaaataacctaacacaacatcagatcactatatataatattactatatataatattaatatgtaaatattaatatgtaaatgtgtagtttgggaaagtggaaaatactttgggaagcatcgaatggtatgttaagctgcaagatgtcattccaatagttgaaaatatcatttgaaatcgtgttcagatacttgagaacgttcacggtgtacttttcattgtaaaggttagtgatgtcgaacttttcgtaggctctgttaattgcgttgaaatcaggtacaatatccgagaataaaattttcttggaggaggtttcaatcactttgagaagatccagtgaaggcatgaccttggatagtttttccatgaggttgcacctattttgcagtctcttcacatagttctcatagttgctaagctcattcaaggcgttaagtctatccataaacacaaacaccttatttaaccatgtatccttcagttccttatctatctccctcttggtcttgttcacggaattgttacctaaattatttgtatccttattgttattagtattggaattggaattggaattggaattggaattggaattggtggtaaaatctggagttctgtatggattcaaatttgagatgaaattcttgaaaatgctaagtttctgaaggagatagtagcgttcacacttaacgaatgacgaaacagcggaaagcgtaaagttaaagcaacagagcttagtttcaatgttggaaaggaacttgcaaaggccttgaatagagccgtaaggcagtattaatccaaaattttccttaaaaaggtcgagtaaaatcccactaaccagtgaggtggatgaacttaatgttgcctcgtgtattaacaggtctgcgtcatttgctattttcttcatcttactactctctgaagtgtcttggcatatggctattttcttaaccttttgatttctttgacctgatttctccttttgttgtatcacgtaacccaccgtcggcattgtatgctccaatccagccgccaaaacctcaatatcgttatcttcgtacactttataatacccgtctttatttatatatatatccccaaccacatttgctccaccattcacattgttaaccgagttgccagtgttaagagtattagagttgagagtattagtcgagttaatagtattaatagtgttgagagtattagtagaattgatagttggaggttgtgtgggaataagttcgtgtactatgaacaggttgtgattatttgacattgctgaggtgttttggtgtattgagttgatcagtttcctggagccgggtgggccatagatttccagaggtttttctcgttcccttaaatacaaaaatgaaaacacgccgtaacaatgatcgccatgcaaatgtgttaaaaaaatacgatcaacattcaaagggtctaagccaatgctttcaagtccatttttagtaccttctccacaatcaaacagccatatcatactattggccagatttcttctgtaagttgatcttgttttaacattttgagctgagttcatatttttgttaggcatgtttgactgtggatcagaaatcctttgaaaagccatggtggaagttagtcttgtagatgttggctgtctggatccagaccctacgaagtggataatccaatcgccggtattcttaaatttgtaaagctgcttcctcccgatttcgtgaacattctttaagctttggggtgaaatgtaagaatgacttaaatgctttagcaaatggctcagttcaatcttctcatatttcaccgattcttcattctttagtttgtttatctctacattatcaagtcctgattcactaatttgctcatctgagtttggaggtttagaaatttttataaaagatttaaccttagttaggattctcataactccctttttgaacctgataaacgaatatttaagtgatagaaatctttgcctagctgggtttattatgccgtattgtatgaagtctgatagaattggatccacaatcttcttcaatatggaaaagagcttatattttaaaaagtggaaattagtcattcgtgctctgtagatatcaaattcgcccagttctaccgtgtccttaatcttattgtatacatagtgtgtcgagtataataattttgacctttcaccaaatagttctgatagcatatcatcatcggtgtttgtgatagtctcaaccatagaattaaactgttccttcactatttgatcgattttctcaattagtttcccgaatcgtaggaattggtctgaggtccaattacactccctaatgccatcacgtggctgggaatgccatacattccagtgtaacaggtgaacaaagctcttgatctcttccaaaacgcctagtctagccaggtaagtttcagaggacttaacgtagttctggagtcgagtgtaaattgtgtccttagagcgtctctttaaaagcttatcggatggacttattacctgctccttcttgtcaactgtttttctaaacactgagaaatcgtctgatagaaaatttaggttcttgtctcctgaaaactcaaacacacccttcacatcatcattgtaaactatcaactcatctaacagggactccttatctaatatttcatgccttataggactactttttattgatcctttatcaactatagattttaaaactgcgtttgttgatccagctggtggaccgggagaattagggctggagtcagtcacgtttaagggaggtttatgggattctaccaggattctttcatcttttaagtgaacagtttggtctctataggaattagagtcatttaatccaattttatgcgatttatttttcaaaaaaccaacttgatttgtgttattgtacaggttataaaatgtgacaaaacaagagatatttgagggtcttctgtgcgataaatgactggaaattgttaaacattcttttaaattagaaataattgagaaatgtatgagaaaaattaaaatatttttcatagtatagttcaaatttaggtaaaatccttagtataatctacacatctcagtaaaataacaagagttaaaatttttattaatttacatctcaaatacatataatttaaccataaaaacgggttttatcttacacaataattgttatggtgtaaaaagcattcacattaaactagtttaattattccgtattttacaattaggcccaaaactccgcaaaatatctgaaatgcaatcagaaacaaagacaacttttcctcctccatagggccgaaaacctacacattaaactactattagaacataccaataaaaacaaattaagtaatgttaaattctttgaattctccagttttttcgtccttccattaaatctaactcagatttaacccatttacacagttttttgaaaaatttattaaaatgtgttagacagtaccttggaactctatgccttggacacggtatgaaacctaacagctaacaacaattaatcattaatttattacctgtggaattgatagtaaaaagttaattagttgaggcagaaagataaatggcgccatttcacacatgttactcattattaatacgacagagaaaaacgttccctaaccaattactttacagtgaaatttacaatatttatataatttcttaccgagaatagtgtgtaaacattccctacaaataacttggccgggtaccagttgaaacaaatcaatgctatatttatcgcgataaaaggcattgtgaggtatagtacataaattttctgaatcattttatttaccgtttagtctaaccttctccaaattcattccaaattctccatattttacaccagaactcttatatatatcctaacaactattaataattgtatttaccagtgaatttgaaatcagaatgaaaagtgacatgacaagagattggccaagttccagcccattaatccctgtacacaagtaatatgaataaattaccggcgtatatatttatagaattagcgcaaaacactgttagaattgcgatataaaaacaactcagcagtttaacatatgacccactgttaattggttttggtaaatattctaaaatgccaattttagttccacagtaagccaaacacagtggcaaagatgctacaacggatttatttatctatttcatacctaaaacggggcctgcaattttactaaaccagttaagtaataacacgtcatctattagtccctgataattataaattctatattaagtaccagtagagtcattaatactatagacgcaagtccagggttaaccttaaagtactacacagtaaattaagtttatgaaatacttttccacatttatctccgagtaataattgaacaaaaatcatcgataaaatgtataaaacacagccaaccaacgctcctggctcgggaaccttttcatcagtttcattgttaagattattactaactagtcctaaacaataggtgtgtaaagaagatacctctgagtttcaacagttttattagaaaaaaagtaccaaaataggtcaaaaatgccaatactacaacaaatagctgaaaataaacaaaataataaaaaatataagaaaggttctttagtgaataggttgaaacaagggaagaaaagctaaaaattataggaaataaggaaaaaaagtttatggaaggctcacaaactgaggataaacttctcctcaatttaggtatcatcaataaaacatcaataccaaacacaccaatatttacttagttaaaattattaataatatcacacatacgctcagatattattttaaacttgataaaacaaggcaaaatatcatgaatcttgttacaaagatgtaaaattaataaaaataattatagccacgagttttgtgtaaattataatacgtgaaaataattaaaaataaattaactgggtggaatcttgaaaacaacatttatgtgtaatatgtaataatagattttccataattttgtaaaaattacagaattcattcaaatttaaggaaatattaaatcaaaagaatatctgagtgaatttaggggaaaaaattcaaaaattaaaaaaatgtgtaagttgaaaatttggttaaaaatcaggattatggagtaagtataagaagtttatactaaaaatccagttgatttttgagtgaaaattgatgagaaaagttaagtgtgatgttggtgttatttatggataaataattaaaatttggtagtggggtttgacacgtgatttaatcgatttccttatagcctattactttattatttatttaattgaaaataactgaacttcaactatggttaaaaatgaggcggactcgcctggcttctactccgttccgattcctggcactgaggaagaaggtttttgtcaatttgtgacatttttgtaggctttagtcccgtttacagacaccctaagcacgaaaaaattctaggtgcatcagactttggtgatttcaagacatcgtaagtgaatttattcgttaatttggatcagttgggatctttttcaagctggtttaaggagaaaccccgacgctgaatgcgtcgggaaaagaaaacggctccctgacggaaaattaggcgatttcgagtttaacacttactcagaagtaagtttcggtttaacaaaattcttcagttcttcaaaaccaccaaggccgtgggcagttccctcgttcatcataacctagtgaaggagcaaagaatatctcaaagttctttccaaggaacttgtaaattagttgggttatttctcccaagctgtgaagagtggcttctcctagaacaagcatgctacggttacggctacacactcgttccaatctacactactctaggaactgaatctattctattcgtattaaccaacacaggtaattttatctggaataatctggttaggacttgaattgctattttgtactgaggaaaacgcggaaaagctttttgaagtgctttccctctcaaaaactaaattacctctgaggaatttggtactcgtcaactcatcctcagttagcgaaaaacttgtaaataacccttacaacctcaagttcatgctctggtctgattttctacaaaaggtatttcttaccccgttacacactttacacactatttatagtattttacactattttacacactatttacacactttacactattttacacactatttacacactttacacattttacacactctacacactctacacactatttactcatttacacactcttacacactatttacatgtttactccgtatacaactttgtaaatgatgattagggtatggatactgagttggatccaactccgggtgatcctgactcgcttaatataatttcttatacgtctggaacgacgggatcccctaagggtgtcatgatcactcataagaatttcatcgacactgtgctggtgactatcgagggaggtgagttactattcccagtgcttataattaatttagtgtgcagacccatgggcatggacgagcagcacttcagttgtcacctcagctacctgccaatggcccacatgttcgaaaaggactttgttaatgcagttttctatctcggaggcaaaatcgggatttactcaggggtatcccaatacgtttaacaaatttgtaggacgttaaactcataatggacgatctccaaacactcaaaccaaccctgttcatcagcgttccgcgactttttcagagaatacacgacaagatcctctctggagtccaaactaaatccgcactcgcacgacacctgttctcacgaggactcgaatctaaaatcaaccgaatcagaaacaacggagtctacacacacaaattctacgataaagtattttttccctatttacccatttttacacattcttacacatttttatagtttacacatttttacacattcttacacatttttatagtttacacatttttacacattcttacacatttttatagtttacacatttttacacattcttacacatttttatagtttacacatttttacacattcttacacatttttatagtttacacatttttacacattcttacacatttttatcaaccgcagtatatactaaatttattatatacttaattgtgtttagttgatattcgacaaggttaataagttgatgggtgggaatttgaagtggttgtttgttggttcatcgtgtttgagtgagatggtaattgacagagttcgagcaatgattggaaagcctctgttttggggctatggtcttacagaatgctgtgcaggagcttttgtacagaatattcatgacaggaacccactgaatttgggaggcccgtcaccagggttccagttcagaataaggtcaatcccggaactaaactactttgtggataaaaaaccgatccgaggcgaacttgttatgaagggtacaaatgtgtcaatgggctatttcaagatggaggagatgaccaaggaggtatttagagacggctggctatacacgggagacgtcgttgaactcatggacaacggcagcgttaaggtgattgaccgtatcaaacaggtgtttaagctttcccagggcgagtacgtagctcctgagttcgtggaatccgcactcaactcctgcatttacatcgcacagtcctacgttgttggaaactcagacgagaactacccagtggcaataattgtcccagacgaagaagctctccaaagctggaaaaaaactcacggactcaccaaagcaaatttaacacaactcgccaaagacccactactcaaacagtttttattcaacgtacttttcacacaaatttactattttaccatttattatactatttatatactatttatatactatttatatactatttatatactatttacatactatttacatactatttacatactatttacatactatttatatactatttacatactatttatatactatttatatactattactatagtatttacaattgtattgataggagttggagagtgtgatgacgagttcgaatgtgaaggggtataacagggtaaaggagatttacatccacgatgagcttttttcggtggagaataatctgttgaccgtgaccttcaagctcaagagaaacttcttgagacagaaattcgaaaatgaaatcacgcaaatgtacgcctcactcagaaattcaaacacaaaatgatagtctaaaattaactttaattccaaagatctctaatctgttacatcacatttgtattcctcactttataattgcattcctcactttataattgtattcctcactttataatttttgtaaaatatttatccatttttgtaatgtaatattaaacaaatgcatctgaattctacacctaagagaagaaggctaaatccaagcgagccgggaatccaaccaggacgatccattccgccaggtaagaaaattcccagatatccatcagacaaatatcaacaaaaacttgattaaataatttttcatgtcagaattcgaaaatacgtctggaaaaatcatcaaagtcacactgttcaactttctgaaccatgcacatctgaccttcagctgctcgccgtatcttaacttaattttcggaagaaacgggcgtaagtcataaaataataaaatttaaccctgtttagaggggaaaagcgccattgtgcaggccatagcactgtgctttggagctacaggccactccgttggccgtgataccaacctaaatcgctacatcaaagattatcacctcaaaaacggacccaagtttcctctaaccaatttatatccagttttatatccaattttatatccaatatgtgtagtaatatatccaatgttatgtgtaataatatgtgtaataatgtgtgtagttgtgctaagattgagctgtacatatcgaacagtggtccaaatagttatgagccagaggtttacggcgatgttattatcctatcaaggttggttaaaagtgttaaatctctgtttagaacaatttacaagaacgggtccacgtattatctggccagttcactgattaagaaatcaccagttgatcgtaaaacactaaatcaatacctaagacagattaaaattaacgtacttaattactattatagttaacatccgtaaattacttgtaaaatgttgtagataaataatcctacaacgtacatggaccaggagatgtgtaaatcgttctttttccagtcaagttctcacagtttttacaaatactacagctcatgcgctggactagacgtgagtaaattagtgaaataattgattagaaaatggaagagaagattaactctgagaaaaagaacttagaggactgtaaggctgagttgaggataaggaaaaaggtcctggagcctgataagcagaagctggaacagctttcgaagcaaattgagtcttttgaagaaaaattaaacgagtggaaatcagcaaaagagtcgtacaaattagccttgtatagagagtcggtggaagattacgagactgccaagacgaaatatgagaaacagaaacataacaacccaactgaacagattaaggaaaaggaagagttaatttcagagttgaatacacaactaagtcagcttaaaactgaaattaataatcttacaaccagctccatggaactcaaggataaaatcagaaccgcctcagactccgtttccatctgtgaagactcaattaaagagtaatttcactcatagtttggtgttaactaatgtgttaggatgaagtcgtcgatgatatcactggagtctaacataactcaagttgaaaatgacattaaaaagctcaaaactgatgtataattagttaatccacccctaaatttctatacatttttaggacaaagctgacactaattccaaaaccgaacttgaacaactcaaaaaggtgcaaaccaatatcaccaacacttttaatcatatatacaatattaactatatacaatattaattattatatattatatatttatgtgataggagttgcaatttatgagtgacgaatatgaaaggttggaggaggatcaccagtcgctgatgtcggaattaacatcgtatgaggaggctaacaatgaaattgactcacaaatggtaatttatcactccattaatcaatttagaaacaaatcgacgcggatttggaggaactgagacgtgactatgagactgtcaaatccaacgatacaaacacatttttgacctcaagattcatgctatacaagtacaatgtacgttcttatctataacactgatttgaaaatattgttagcctgagcatgttcgggaaactatacagaagatgaaatcgtcaagcttattcagatatgaacccataggcccagtaggtatctttcttcccttaagtatatagtgaaattatatctcaaatgtttactttgtgtaggagaatatttgagagttgtccagtcagtgccgtggaaagtcttaccaatagttgaaagacatttgaaaaaatttcttttcaactgggtagttcacacagaacaagatcgaatcgcactacaggttcaaaatcaaccttttttccaactattttatccaaccatttgctaatcaattatttactaatgaacaattttatctaaacatttacttaacaatttactaatcaattatttgttaatgaacaattttaactattggttatactatgaaattatgaatgggtatagaaaatcctggttgatagtgggtgtgatagtaacagtatatacataacaaagacgaacttgtttacaagagagacggactcgatagaaaaggcccagagggaggtgagtgaggtaggatttaactctgtaattttaaattttctggacgtaaatgagatcccgaaagtgctcctcagcatcatgatcgactcctttaacatttcaaaaacggcaatttgtaaagatgaaacagaaatgttatcagtgttaaaggacgaaaaaatgaaaatcacagctgcatacagtattaataacgttgattttggaaaaagagttaacggagcactgtttctcactccagcttatgataagaatccgttccactaccgcttcgttaggtactcatgtcaagacgcggatactctatatgacctcaaacaaagaatgtcagatcttaaagctagagaaactaccattaaacgatattccaaggaacttcacactaaactgatgtcgaataaacggaaaatcatctctactaataataaaatcaactccattaacaataggaaaacagaactcataactgaaaaaactaaacttgaagcagacttaaactcacaaatcgaaattaaccaacttttaaacaatgtaattgtcttacaataattaatcaactaattaagttaattaatgagttaaatgagttgagttaattgaatgttagaatgagggggttgacgaggtggcgaatttgagaactaagtacgctgaacagttggactcacttaagaagcagatgaccgaatttgaagacaaacttgacgttgtttttaaggataaaatgtctcacgaggagaatatgaggacactcaacacctctctcgagtccattctcgaaaacatatcaaacaaaagaatggtaccaaatactcaaactataaaaattgtccaacaatattttaagtgtaaaaaaataactttaacaatatttaactaaaaatatttgactaaaaatatttaactgtgagaatatttgtaggaatcgaataagacgcaaacgtcgataaacaactgtaagaatgagatcaagcagtttttgcgggagagtataaactacaataatgtgctgaacgattgtctgaatagtatgaacgaggctgaaaagcaactcaaggttcgtaaaatttcaactaatattattagaaatgcgagagtgatttgagagagtctggaatagactactcaggggaattaccacccaagaaatcacaagagtaccttaggattatgaataccagccgggagattctatcctcaattgttaactcctcaaccggtatagaaaactatctcgaggtaactttcaatctactcaataaagttattaagttaattgagttaattgggttaattgtgttaattgagttaatgtggagattagactttgagggtaaagtattctgaggcggaggagtctttgaatgacaagatgtcaaagttgttggaaactcaaaataactactcaaggcacaagacaaactatgccagcaggttaaagttgtttgacgagtacagactaagaatggagcgattggtatttattttagagtttaacaaaatcttaggctaaagctgtgtttaaaagtacacttgactctgtctgcggatacgacgggaatttaatcttcaatgacctcaacaggtttcaagtgtatagcaagggattaaattatgtgtaggactctggatgttcatatacataataagcagcaatcttatgagaaagcacacgtagctagagatttgaaggtaaattagcttaaactaatgctcctcagaccttaagtggcggtgaacagtcatcaattcaactctcaatgatacacagcctcgcatcggtatgattcagaatttcacaaatattcacactaattcacaaatattcacacttattcacaaatattcacacttattcacaaatattcacactaattcacaattattcagctctcctactcaccactgcacatgttcgacgaaattgatgtctacatggatgaaagcaccaggattaaaaagtaactacacatctaaacttagttgacaaatttactttagtgtgaatgcgattgtggcctttgcaaatgataacagagatcgccaattcttcctcctaacaccgcatatggaatttgcaagacacgtctcaggtattatttactcaaatacatcatacagagtcacatccgcacattacaaaactattcaatgtctctaaaacttaatctttaaaatgtattatacatatagaaaattaacaaactgtttcctgtgtacacttaagagtttactgagtatacttaagagtttactgtgtacacttaagagtttactgagtatacttaagagtttctgtgtacaattaagaaattgttttcctgggtcttacgcgtttttttggttccttgatgggtacggaactgtctgcctgactgcaactgctgcccatgtcttccatttgagtccgatcaaagtcaggatttctggtctggtaaacggacaaattcatcaaatcatcgttttgaccgtacattgcattctctagccctgatacgtcggtgcctgagttcatttctaacttaaccctaagtaactcagaaccaggcactagagtagactcaaagcagtctccgcagggataacagcaattagaagcgtagacagggtcgttgtaaacattcatgatcatttcattaagcatttggtttctgttttcctcctgctcagtcttgaactcgtagtttgcatacttgtcagagtagaacccctcacagggcgtgctcgagtacgcaaaatcagtaaatgacctaccagtgcttgaagcagacgtggatccagttaaattatcacgaaagttttcggcgtcagacaagtcaattcccagcttttcagagctaatgattgttaaactcaggcagaacgtcagcagcttcaacttcccaatgaatcccatggcaataagcgtaaacaagttcctaaactcctcaaactcaaactgcgtcatctggtgtatgctctaaattcattattaactttttatcactaataatgaaggtaaacttagaatgtaatgagtaactgggttgatttaccctgagtttggcggaggtgtattcaagttggttgggaactagtgggaggaaggacagtaagtattcctccttgacgtagcttagaaagacgtattcgcaggtgagttgaaactcaattgcaatgtccacccacttgctcgagaaaaacccagctaaagtcaatattaagcgcaaaagttacatctgtcagggagtaatttatcctttaactttgttagagttattaggaaattctgaaaaaggctacaggcctctgctaggcacgggtacttgtagtcttcgttggtttctatgatatctacaatctccctcaagccgtttctcaaacatttgaatttctggtcactgtcaaaatcctttgatgaaatgtaaacactttctttacggggatatccctggtttaagagttccatgtaactcgggtcactctacacacaattatctaacttaacttaccagtaaatccgttactgtgtaattaaagaagtcgtttttgtaatcagtttcttcacctaccattttaaaatattacttttacttttatcaaattacttttacttatatctaattacttttacttatctaattacttttacttatatcaagacatagctagctattaaattttaatgcgtaactggctagcatttgagtaccttaaactcaatttatacactaaatttataattagattccattttaaatgcaaaatattaagtttaaatgcgataaacaggagttttcttcatttaaagcaaaatgttaaaccttacacatgaactatgaaattactttaattattccattacttaatagtaaaattaacaattttattccataaaatattaatttagcgtgacgcaccggtgatcgttaatgctgtagactttaattggcaaaattaaaaaagctccagggcggggaatcgaaccccggtcacccgcgtgacaggcggggatactcacctctgtactaccccggatcaattctaatacataattcatatttaaatgatccacactgaacatataaatgacaaaatcagtactaatttgattcaaaaacaatttataagatttatcactgttttatactatttattcaaaaaaattttcataccaatataaacataacagttgaaaaaattcaattatgaataatttttacggtatataactattaactacataaaatactaatcaaattagttagaattgagagatttataggatagagtatggaatatcaggttctggaacccattcaatatgaatgtataagcctgtactatccgggaaaaaagatggaaaagataaaaatattaaagaatatttaatggaaacattaaaatttatgttgaattcttacatttctgatgtgtttagtcaagtttattggaattcttaacatttgtgattcttggtaagaataattaaaatttcctttaattttaattttatttacaaatattaaattaatattttaaaaattaaaaaagctccagggcggggaatcgaaccccggtcacccgcgtgacaggcggggatactcacctctgtactaccccggactaatctctcacaacgaattaactattaactattcataaacaaaagtgagattaaactaatgtacaattcaaactgagtttaatttatgtctccctttggtgtatatcctacataatataatattaataatggtatacctagtatcttcagggtcaaatccttgttcaggtgatccgaaaagtgcccagtcaggagtctcacaagagtaatccaaccctgaaaattcaactccactcgtgacctgtgattattaacagagttttaaacttaccagttcattaaatttatcataattaatccacgtcagccactttccattcacacaataactaatatattataatgtattataggtatatagttaagtagctccctctcggggtatataagatagctccctctcggggtatataagatagctccctctcccttatatagttatatagttaattagctccctctcggggtatatagttaaatactataggtatacagtaagatagctccctctcggggtatatagttaagtagctccctctaggggtactaattatgtagctccctctcggggtatatatctaagtatatagttaagatagctccctctaggggtatataagatagctccctcttggggtatataagatagctccctctcggggtatatagtaagtatatagtaataatgtgtgtagggaaaaatactcatttttagcgattagtgcgcagcaggtatgtctgtgttcgcagactaggctgtagttcttcttcacatgttcgtcggtgctgaccagtgccttgcagtactcaataacctgaacaattcagctacactagccctacctcgtcatgccagggcacgtttttcattgttatggcgtttccctccacatttccgcaaaatgtcacagcctttacctccacaaaatcaggctcacccagccttatcaaattggagtatccctcaatctcattcttttgctcctatatataataattataatagatggttacggtcatattgaagttcctgacgagtgtgagtctgaaaactgtgcgttctctgcgatatttcagcaactcaatacaccttagaaaccggtcccaaaagtctctaaacagcggccggtctaaatttcttacacattattatgcggtacctatattcctaaggcttgccctatcggacgcgtcaattgaaacgtacaattgcgtaaccggaaccaacgcctccatctcctcagggaattgcgcgtttgtcacctgtcatagtattacaattataattaatataattaatataactctgtagagaattacgagaaaagaggagatttggtgattgtgtagttcgttgatgagttgattgatttgtgggtacatgatgggttctccaactagagaaagagcgcaatgtcttattctaagtgcttcattaaaccttttctgcttagtgtcaaagattcctcttaactcttttatcagttttaggtgtgctgtgatggattcggagactatgaacttggggtcgtcctggtcccacttccacctggttcccaccggattcgtgtgatgtctccagcagaacacacacttgttagcgcatgctagactcggtgtcatctccatacactggctcgaacttatcccatagaacgtgtgcttataacaacccccatgccctcttacctatattatatttattatatttattatatattatatattatatggtaaattgtgtaggaaatacccttgacttggtccacctacagagctttacggcgctgtggtcaccgatgagtttgtatccttgctttattaactgattacgctgggttactgtcgtcataccacccaatttacccaagctctctatgtcaacttctatatcctctgtaccctctgtctcatctgtaccttctgtactatctgagttatctgtactatgagagatatttgtactatgagagatatgaggggtatgaagattagtgtgtggatctgtgtggttattgggatatgcggtgtgtgaggtggcctcagaaatgagatcgattagtgatagaatctgtccaacgtcgccgcttttgaggtaaaaattcctccgaaaaagcattctcgagcccaaattcgacaacaattccctcagtccatcaacatcctcgttcccaactctttcattatgttcattatctacactttgttgagtgtcagggggatgagaatgttgaataacgaagatgaagttgaggttgaggaaaatggatttgtcgactctgaaatcggacagccagtcgttgagtgcattttcaagtttagttattcccgaactatgactttcaaaaatgaaaataattacattcccctcgtcagagtgagaatttccgtttaagacattggcaaactctgaaaaggaaccgtcggaagctgaaaaatcagcggaatcctcagtcgttcggttaccaaaattcagtaacgagtttaaagatatgcatttgggagtgcgtttaacgtttaaatactccagggctatttccgaggccaatttttgactatcacacccgttctcgtccgaaaaaattatcgtaatccgctccctcccaggaatcatcacaatttttttatcacaattttatcatgaaatttttttatcataatataattttattgtagaataattttactataaaataatgtgataatatgtagaatatgataatttgtggaatttgttgatttacgtggtattttggccccaattgtgttttaaattagcatgtaaaattctaatgcaaaatgtcttaatatttaattttattattgttttatatattttcaagtcaaacgcgacttatcgcaataaaaattttatcagaaggttcaaaccagattcacaatttttaccttatttatacattaccaattcacacactattgccaattctcacagtatttctaattttcaaactatttctaattctcacactatttccaattttcaaaatattcccactttcaacaatatttccagtgtaaaaatagataaatttgacatattaaggggtgtaaaaaatgtgaagtttggagtcagaacgttcactgtgttaacggcgctgaatcctgagaatgccgagttacaccctgcggttttaagtcccgtggagtccaaattaacacccgaagaacttgaaaatcttaaaaaaaaaggcctcattgatggcaacacaaacacctggaggaactggcacatcatctccaaaggttatatcaattatgttattaacaaattttacaggggaatggcctgacattggccctagggtactcccgggaatggaaaaaaaccttaaaatcaccgagccctacgctctcagaaaacctctcaaatactggggattcatgcgaggaatcgtattgtctacgcatctaaacttattctattccattctattactcaattctattacacaattatataactcaattccgttatgaatttgtaggagagtaacgtgttatcgtatcctatattgtatgagtattataaggacatgggtaatattcctgtgcatgagcatggtgggaataaccctttgtttaacccgcttttgttccagcccacttacactatggaaaaggaccggtgcggtctattctacgacgacgcacggctattcgaaggatggatcaacgcaaaccacgatacaccaaccaaagtcaaagaagcatccgatctcatcaggatacccgatacaggtacacactctcatacccattatctcactactataattaagttactacagttaagttactatagttaagttactatagttaagttactatagttaatatgattgtaggaaggttgtatcagaagttttacatgggtccgtacccggtgacgatgggttggaccataggttcacttttgaaggttatgactcagtcccggtgcccaggccacgccgtcgtcgctgttaaaatacataatatgaacaaggacactactgttaacggcgtcgccgatgaccttcttaacatcgcactcaaccttaaaatggtatcctacacacatttttacactatttacacacattttacacatttacacatttacacatttacacacttacacatttacacatttacacatttacacacttacacatttttacagatttttacacaatttatagtataattttacacactcttacacatttttacacatagttacacactaacgtgtcttatttacacattcacgtgtcttatttacatatttacacactaatttcagtattttacacactaatttcagtattttacacaattaccctaacttatatattagtaataaactgtgtataggtttcgttacagacgttggagtatggaaaggaggctagggtgagaacggtgattaagggtccggcaatgttatgtgccggtgcattagaatggccctcatttgttaagctttgtaatcctgagtgttacatcactaagctagaagaaggcgctgaactcgatcttgaaattaaaatcgaatggggacgaggcttctggatggccgattccaaaggtatgaatactaactattgtataattcactatcaactgtgtaatacgctaaaatatgtgtaatacgctaaaatatgtgtaggattgtatagacttgaggagggagcaaattcattatgtcacaagcgacgagacataaaagaagttaaggaggaagggttttatcccaccagttgtgtctttggcgggtgcagaatgatacgacttgccgtacataaactcatgggacaacgatggtgctcactgtatctccatcaacactattaacagattaaatagattaatagaattaattagaatagattaataagattaactaagtggaatgaatggaataatttagaacgtatacgtgtcctgatcctatggaccagttggtggttgaaatttggacggacgtgtcaactactccgaaacacgtgttagagttcggattatctgaggttatcgcatggcttaccgagtttaaacgccaagtttcacacgatgtcgacttcgaacacgaagacgaacaactcaaaggtttctacaatagttaataatagttaataatagttaataatagttaataatagttaataatagttaataatagttaataatagttaataatatttaataatatttaataatatgaatattacagatatatgggaaaagattgataagtatggttctatgaagcatagacaggagctgatgggtggtccaccggtagttcctctgcatgagactgatgccatacctaacctgagacaagaagattgtcaatatgtaaacccaggggatcataccaaaataccacaagcgaacttctcacttcccaattcaggaccacacgtattattcatctattaaccatatacaactatatacccctagagggagctatcttatatacccctagagggagctatcttatatacccctaaagggagctacttaactgtaacaattatactgttaactaatttgactgtgtaaattaatgtgtagagtcctgaattggacagtttgcagtggttggcggaagagcttcaggctgaggagtacaacgaaaagtctgagataaacgccaagaactttgagaagtttatacccaaacccgtagaggacacctttgaaaataaagatattgatcttttaccagttaattctgacatcatttcctcactcagaatggtatttactcatgattattattgtttagtctggattcaatgtgatggctgatttaatggattactcagtggaggaactatcgcatttcccaaacttatcaattgaatctgccaaaatcattaaaaactttctaaccgaacataaatcatcttcataaaatcatatactatcataccatatatacacatagtatattatacatactacagtgtattacatattctaggtattagggtgtccaggatcttaacactattagggtttataggcctaaatgtctctattatctcttaattaaccttattacaacagtattcataattattaagttgtatatacccttactatagtactataccatatatactatactatatatactatactataaatactatactataaatactatactataatgtatatgtatagtagtaggagtataatacatagtattagtatacagtaagataacacttattacagtagtacataacacttaatactcattaatactgttgtaataagcttaaataatgtataataaagtcattatactatgttatatacacctactactataattactatatataactatactatatagtacttaatatactatatacaactatactatatagtacttaatatactatatattatatactatagtatatattgtatatgtatagtagtaatagtatagtagtgtgtatatactagggatcagtaactactacttaacacttctcaatactattaatactgttaataaacactgtaagtagtatattaaaaccctgtaaatagtattataaactacttaatatacacctgatttactacccgtaaacccctactaaacccagacacctaatactatactatatactatatactatatattatatactatatatatgtataatatggtatggtataatagaatggtattagagaactaaaaaattagattttaatgtattgtcaagtttgagaacaagttcgaattgtgagtctccgttcaaatcagtgactgtgagaatggaattatttgcaaggccgtaaaaggccagactgttcttctttacagactctgcgtactcaggatcatcctcaaactcctctccgtcgtaaatgttactgaggttaaaatcaacactgaccatttcaagtcccatggactccgataacactgacttaacaaattcatgtaacgttagatctagggactttattttaactttataggacttctgctgacatgttgtacactttgggtttggcggttctaacaattcaggctgcgataacttacccctaaccaacgggtttgaccccatcacactcgattttatccaaacctacacactatttacacactatacacattacacatttttacactatttacacactatacacattacacatttttacactatttacacactaacgtgtctttttttacacactaaataagacacgtttacacattctacacattacacattgttatatatgagatacctttttgcaatgggagtctagggtgttgtttgatttgaggaatttgagaaggtgtaggagttgtacgacttgaaatgacgcgactatggcgttggtggcggcgattgcgggtacaattgcccctgcaattgactgtacatcccaagtgctcagcggcttaatgccaaagttgatcatcctcaagttagccgcagaggagacaaaatccatacaaacttggtcattttttgagaatacaagtgatcctaacgtttcagggttatttaatattgcctcaacgctggtggaaaactggtcaagtaactcttccatccccaacaccacaaacttgttcctacccctggtatcttcagaatttaaatcgtattccgaatttttatcaatttgactggccttacgtttgagtgtgaattggtgtttgatgggttttggcgggtcccgattagcccaaacctcttccattttctgtaaagatttaacctcggaattgaacagaaagtcaaagatcttattcaaatagtcaactacggctttgtcgtctaggttactcaagtcaggtaatgtcggaactgacaggtctgttaacaagttattattgtccggtgtgccaaacaggagctggtatagcattctagcccacgctatacaatgtgttggcttctcaggaatctgacgaattgaacacaccggaattgaactcgtctttggcaaaggatcacactcgtaacattttgtcatatccttcactataggatacacctgaccattgtatcccgtactccccgattctatcaacgggactcctataatatgttaatagtaatagtatagtaatagtatagtaatagtatagtaatagtatagatattctagtaatacacgtgtaatagtacagtatattacagtagttaggagtcttatgtatagtataagtatatagttaattagctccctctaggggtacatagttatggatatatagttaattagctccctctaggggtattagttaatttagctccctctaggggtatatagtattagttattatagttatatagttaattagctccctctccctctacccttatattattagctccctctaggggtatatctaattagctccctctaggggtatatctaattagctccctctaggggtatataattaatagtatagtaaagtagctccctctaggggtatagttaagagttatatagtattagctatagttaaaagtatagtaaagtagctccctctagggtatatagtaaagatatagtaaatagtatagtatggtatagtaaatagtgtagtaagttgttacgtgactgtatgcagcagtagttgatgtgtgatctggctttgatattgtctagagcgttgagtacgacgtcgaacggggttagatcactgggttcccaagagttaacgtcgcagactagtgatttcacctctgttttagggttaagttccagtgcccgaatgcgggcgacttcagccttgtacttgttcacatgttctggaaggtacagaaactgccgattcaagttggacacgtcaactgtgtccatgtcaacaattgtcaacttcttcacaccagtcaatagcagcgtttttatcaactcgcaacctataccaccggctcccaccaataacacagacacatcactcaaatattcataatactcactcaacatctcattatccccttttattctcactctatttattattctatttattatttcctgtgtattatttcctgtgtataattctctatttataattctatgttacttggcgaatctacgttaaaagtgaattctgttgtataaaagagatattacggcttattgaacatgatgaagattataaagtacaaataatcataaggagatatgaaagatttaatatctgaggtcagaaaagtaaatgacaaattaattccattagtaaaatgctcaagagtaaagataaaataattgtcttgggttagggtaaaattggaatgtgtttatgaatacttagatttcattaaggcttgtggtgatgtagaggcgcattttttaaaaaatcttacattttttagcttttaatatattttttaatgtacaattgtaaagtaaataaattaatgtttcttaatcctttttttctgctggtttttaactcaaatttcgattaaatttaacttctgtagattatctttggaaatctccgatgatgaacgccaaatcaaatatttcttttttttaaaatgaaaataagaataatttcaaagataaatttatattccgagctctgattaaaaaatggttgatcacactaagtcctcagtggcgcattctctcaactcctctgacgctatttcctcttcagatcgtttctccaagacacgaaccaggcataaaaattcagacaccgccaaccacgcagaagctaaaagcttctcaaaccattccgccaaggataaccacaattccacgtattttacccctaataggctttattttggccttatctaggcttattttagtgttattttagtcctaaaatagctttattttggtcttattttagctgtaatttagcttattttggccttattttaagactatttggccttattttaggcattttttagctatttatgtgttattttaggccttaattacctttattttggccttattttactcttaattattcctatttaagctttaaaatagtctaattttacctctaacttaggtttattttagagttattttagcatattttaaccttatttagctttatttaggccttattttaagcttatttaggccttattttagtcattattttggccgaattaatctatttttagtcatttttagctgttattttactcctatttaaggcttaaaatagttatttttacccttaatttactctaaattactctcattttactccttaattattgttattattactctgttgagtattttttagtctgagaagtgactcgatatctgttattgactttgatccgacattagtttcagtggatttttactgtaattactgtaaccagtcgttgtcagttggcggttgcaggatcagatgcgctgaatgcttagattacgatctgtgtatctcttgcgcctgtaatcacaaatgcactgaacctcacaacctaacacataattacgttcccatcggaccaaactcatttgaactcttctccgaaggtattttttactcaccccgtgtatatattttacacaatttctgagttgtataatttgtcaggctggacggcagatgaagagttgatactattagaagggattggcaaatacggttttggtaattggaaagtaccattctacacattattacacactattacccattcttacacacttttatacatttacacatttttacacatttttacactatttacacacttatacatttacacactaacgtgtcttatttacatatttacatagtttaatgagttaaataattgtgaaaatttcttagcaagtggctgagatggtgaacaaggtgaattcgaagcagaagacgccaggtgaatgtgaaaatcactattacgacgtgtacatctcatccggcacgtcaccacacccaaatgttaaaaacctcagaactcccatcgtatctcatattcaactttattccattattccagtgtttagttaaccttatttatccctatacacttaattatacacttagttatacattatacacttagttatacattatacacttagttatatactatgttgtgcattgtgtaatgtgtagaaatgtgtgaagacgagggaatctgtttataagtattacgacgaggtggcaaagagtcacagaaggtttgagaatccggattctgagagtattgtgtcttctgaggagtctgggtctcactcgacgtttatccctccggcggttaatctgctgcattctgacccggctaaggtcaagtttttccagaactttaccgggtacaatatttacagagatgaccttgagaacgagtatcacccagacgctgagttaattcttaaggacgtggagtttgagccctgggactcgccgccggagatccagttcaagatccagctgattgacatttacaatgcgtttctggacgaacgtatttatcgcaagcgggtgttgatgcaccggttttggaacgatttcatgactagggaaagtgccatggcgaacatgactgagcttgagaagatgctttactggcgactgtcgccgctcatcaggttccactctgaagaagaccacatcagcttaacaaagcttttaatagccaaaattgagcttgaaaagaggcttgagattgtgcagcagtggaaatcgctgggactccggaccttgaaggatattcaggagtttgacccgctgaagaacagcgcaaagaccgctgctcctaagcatttaaatcactttagccgcgttccaagcctctctgctaagatcctgagagacggcgtagttcacaaggacgagctctctgagtacatgaacgagataaacgagaagttctgcaacgagttttacatcaccaaatctcacctggacgatattctcaactcagtttccaatgcgcaaactgacactgatttcaactatgagcggccaatcacccacgtctgggacttacactttgaagattttaacattgaaaataacgaacctacgccagacattaagcggttcccacacccgtctgacgttcccgacaactctaacatccgagtgattctggaccccgagaagaaggaaattgacctctcagacatgaaatttgacaatttcaagtttggctccgtacgacacaatgcacagcagtcgaacatgcaacttcatgcgcagtcgttgttttacctcacaaggttctatcatgaacgcgtcaaggtacaaaagaacctccagaaacccaaaatcgaacaattcccagccaaacgaagactctcacaacggagattcatctaacatttaatctctcaaacattttacacatgaaatttaagagtttaaatatgaaatttaagagtttagataataaatttaagagtttagataataaatttaagagtttagatagtaaatttaagagtttagatagtaaatttaagagtttagatagtaaatttaagagtttatatagtaaatttaagagtttagatagtaaatttaagagtttatatagtaaatttaagagtttagatagtaaatttaagagtttatatagtaaatttaagagtttatatagtaaatttaagagtttagatagtaaatttaagagtttatatagtaaatttaagagtttatatagtaaatttaagagtttatatagtaaatttaagagtttagatagtaaatttaagagtttagatagtaaatttaagagtattgtgagatcaaagttcggtgtggaattcgaagatttgttcctgtgagacgtgtttttgaagtatgttttcggcgttgactttattgcgtttgcagtttttttccagaaagagtgaaatgtcctccaggttatccggcccgttgtaaaaaacagggtcacttttatttccactctgaaacaacgctatcgtcgggaactggcctaaattctcaatatactatagcattaactattatactaagtaactattatactaagtaactattatactaagtaactattatactaagtaactattatactaagtaactattatactaagtaactatgtgtttactgatttccatatcttcgacttcattgttgtaggcgtcgaatgttgcgagaattggtccgttggaacccttgagtcttcttcccatgtccctgaaaacacgcttcgccttatgacagtgaccacacctacacatttttatactattattattatagcattactattgttatagaaatagtgatagtgatagtgatagtgatagtgatagtaatgggaatagagtaaagagtaccaagaggataggaaaagtacgagaatatcatctttggattcgatgactcttctgtggaagtcttcgccgacgattgttttaacgggtcctctatcgatgttttcgggtatcggaagctcactcttcacataatgactcaacctgtcattctccaaatcatcaataaatctgttcataccctaaaacacatttataccctaaaattattatactatagtatagtaacagtatagtaatagtatagtaataggtatatttaagtagctccctctaggggtatatatttaagttagctccctctaggggtatagttaagtagtatagtaatactatagaataattatactatagaataatagtgtagaaatagtgttgataacctgttcggagatggttccgtcttcgatggtgagtggtttgaatttgtaaaattcgagtgtgtcgaggttgattacgaaagctctgacgacgatttcctcgtagtctgagtcaattgcgagtatcgtgttcatcttattttccaccagatctgagcccttggagtggaggaaaacgagtttctcgctgtgtttcctgggcacagtgtttatccacgactcactcaaatatttcttcagctccttatccctagtgtaaatgtacactatcgtcttcttcatgaccaggaacatcgggagcatgtacgagttcgttgagtggatcggaggaatcaactcctccttcaaaaactcataaagctccttcttattcctgacatcgttcgtgtaaaatgtaatcttcggtaacaaactcatgttcctcattatcaacagagtaggatactttatcccctcctaaatcattattatattaatatttatatgactgggtaaaaaattacgcaactcaataaaaattacttggctgagtaaaaaattacttggctgagagatttgacgatttgatcggaaagagtttgttcgggtgagaaaaggacaggaacggctagatccttttctgcgatgaatgacctgactgtttctacgagtttcgggtcatgttctgcaaacagcacgagaacttgcacatgtcctgagggtaaggatttctgaaatgacttgaaatttgaaagatccttaacgcgcatctcacacacgttctggttacttagccagctcatgatatacccagggttaataggaccatcgtatttcttcgtttccccgtctttgacataggttaacaccggctccagtgatgttatattcccgtcaaacgccgtcgaagactcaacagttataaactcacactaaattttatccaataactatatttatctatgtgtatatttatctatgtgtatgtgtatctatgtggttaagaaattgtatactttttgatcgtgagagagaagagttgagacatttctgaagtcgttgatggctccggtagagaaaatgaagagagttggataatttaaaaccactgggatgcgtttggctttctttacgtaatcttcaaaatccgactgtgcgacttcaggcacttcctaagcacattgttatcttaactgtgttatgttataattagggaagtaccagaacaaggcctgccaaggcggatttagtgtaaagcttaattactatgaggaagataattaatttacggctgagctttgtcatgatgaaaaggtgaatttttcaaaattgtcacatgtaaacagttaaaactaaaaatcataagtaaaattagcgataatacaaaatataaattaaaatcaaataaacaactggtttcaaaattttctaaacagtacccacattacatatttaaaatttatttaataaaatgttttaatattaaacataattcagtagttttttcacaaaatgtgctaaaatttgaaaatccatacaatataagcactaccaataacaacaacaataatagtgttgacaatattttacaatgttgttaaatatttaaatggcgcctagagattcagatttgtctaataaatttattgtgactaagaagattttcatttcagtgcttccagactcgaacgctctgatccctgaaaaattccaaactatcgccgaatccgaccttccttccaatattttcctcctagacactcccgaagatgataattcctggttcaaacacatcaaggtacaatatacacagtttttaaccacatacatataattgtatagtatataaaaatgtgtaatactgtgtaatactgtgtaatactgtgtaatactgtgtaatactgtgtaatactgtgtaatactgtgtaatactgtgtaatactgtgtaatactgtgtaatactgtgtaatactgtgtaatactgtgtaaaactgtgtaaaactgtgtaaaactgtgtaaagatgtgtaatactgtgtaatactgtgtaaaaattggtgtaggtatgtaggagtactgaattgcttgaggaggcttgttctttatacccaaagtactggaaggtgtattaccgtcacgccttgtattacatatacaagaacgacacgcacagggcaagtcaggttttcaccgaggcgcttaaagtcctaaacgactacggtaatgatttagtaactaattatcttcagatttacacctaaagttcctgctgtttctttaccacacagcctcaattcatgagtatatacactcactcatcaacgccattgaaatggtattttttagttaataccctaaaaattagagtataaatttgtaaaattatactataaattgtgtaagaatgtgtaaaaaagacacgttagtgtcgaaataagacacagtaatgtgtaagaatgtgtaaaattatactataaatagtgtaaaaatgtgtaaagtactataaattgtgtaaaaatgtgtaaataagacacgctaattagtaaaaaatgtgtaaaaatgtgtaaaaatgtgtaaaaatgtgtagtctgggttggattatagatcggatataatatggcgtgagtgggcgttgatactggtgaagatatataactgcaatttgctatcactgaatatgacgtctggcctattgccagacttgttctcgatggtatttttgcactttaatctcattttcaggaccctaacgtgttgaaaactccgctgatcccaagtgacactgaacaaatcgctttcaggtcacctgctaattttgacaaggataaaagaacttatctcacactttacggcgaagttaacgcactaaggaatcttttccacaaggtttcacagtttactcagttattacactattatactattattacactgtagaattatcttacattagatattttacgccataatgcatgcgataatgtgtttagtggttgagaacgccgacgaataacatgagatcgctttgggacgcgtattcgatatttgagaacacaatcgactctagtggcactttatccactaaactcctcggagataataaaaatatcatcaacctctcaatgagagcctacgaagtattttactcccaaaaatcacaccatcaattaatcaattaattaacaaatctaattgatagataaataaaattaacgttggattagagaataactgagttatattcgaaggtgtatccgataaaggctgcgtcgtatgagggaacggtgtcatcaaattccggtgtgcaggtggctatagacaactggatggacataataaaatacgaagaaacaaatcctctggaaactgatagacaaagtcttatagaacgggtcattttcaactttgaaagggcactctgcccactcgtcttctccagagaaatgtggtacaaatacttccagttcctactcttctcagaccgaagatctcaaggtattctcatttctatactataccatactatatatactgggtaatgtgtgtagggattgagaagttggagttggtgttgagtagctttttgcgtgacgacggtactgagtaaaattaatataatttgtagaaaagttacgattcgtgttggcgttgtatttggacgagtctggtgagcctgaaagggcgcatgagcatttcgcaatgcttgtgctacctggtcttaggggtaaaactgaccttgatcaggacctaaccggcgagctgaagctgagaaaactgctccagtgtaaagacttcatgtcccacgagaagtcggaactgggcgggataatacattatttgaactttattcggagggagaagcacgtcagtgagtggcgggaggaggtgcagctgatactctcaaagtccgacctgagctcgtgggacctctactggtacgcagcaagcaccgagatgaggtgcttcaaagactacgacagagccattcaaatactcaaacaagcacaaaccaaaatctcattcaacttcaactacacactactcttcctcaataccatgctcaacatcggaaaacacaatggtaataattatattattatatataatattatacatataattatataaattgtacaaataatataattgtgtgcagatgtgagggtgttattgtcggagttgatagttgggtcgttggacaagagtagtaagataacggagacggaccggggtcatttatggaatttctggctcaatatggagtatttatacggcaccgcagagcagtttaacaaggttaagagtttatacgtttcctcgatgatttcagccaagttgtccctggacactttcacggagaagtttacgcaaggctccaggccaactgtgtttgcactttactctgacatcacagaagcctttgaaaaagcctcaaattctaagcgtaaaatggctcaagacctgggcgcaatcgttgaaagtaggaggaaactcttttgctccggaattgatttcgaacaccttgataatattttcaagttcaacatcacatttggtacttcatattccgttgatcacaatcctacgaatattcatactaatcatgtgtccaacactgtgtccaacactgtgtcagaaacttctaatgttaatgtggaacaagaccaacaggacagtgttgacttggacaatgttgatttggtggataatgctgatttgtccgatgttgacgaggctagtaaactacccaaaaggataaatccaaacttacaggataaccctaaactaaaagaatttacacatgaaccgcgggaatatatgacggtgataaagtatggaacaaagatttgcaggccgaatgtgtcaaggctttcggagattgagcctaagatgacgacgtctctggagtctttggttcagctgcacggttctaagcgaccaattctgcccccaaagttcagaccactggactctacggggacgccttgcaaagcgctgtttgacttcataagactactcccgtcctcaaaggataataagttctctaacctttacgttaacactgagtcaattgactacctaatacgcacagtggagaatatggacctaggaaatatcgaaatcgaccagtaccaaccactcccaacaaacctctcaaaccaactcaaacaaaccgtaacaactttctatttatttttattactttgaattattgatttattgaactttttattactttttctattgaattttatattattgatttattgatttattgatttattgatttattgatttatggttttgagatgttgtaggatgagacgttgaatgagaagtcgtttgagtttaaccaaggacttgaaaatattctaagatttctacaggtaactcttgataccacactctgagttatttacattatgtactgaaaataagtaaaattgaaaatttacaggacaatgcgttatttgatgagaggcccgtaaagaagccgaaaatcgcaatttaacctgcaatatttaattttttaccttctaaatatcattcataatatcacaataataatattcacaagattagtgggagttgagtgatttaatgggaattgagtgacttggtgagttcgattttggtttcttggtgtcgcatgcagtacccgagagcgagtttccagaagcagagttgcatggcaaaggagccggtttgctgtatgatgagcttttggtggtctttgacgtcgaggtagttatggttcaagacagttaaaagctgaatggcgttctcagtagagtacctcatggcatataaaatctccgggttcatgttgtcgaaaatgccatttatgtaactccgaggaagcctcctaacgtaactcagaagctcatcacccacactcaaaccctcaaaatcctccttttgctcacattgaccaatgttaacttgattaacattgggttgattagtattagtttgattaacattgggttggccaatattagtttgactattgagagaactgattggagatgtggaagggtttaaattgtatagtgttgataatctatacctttgttcggcattgcagtagatgtacccggtaatttgaaggttaagtattagagcggcaagacggtcagttgtggtgataatagtggtctcagcgctgtacctgtagaaagagccgatgagtgtggatacagtgaggcttatggcgtctttgaccatggaaggtgcgattttcagaaactttttaattatgccagaggggcctgtccgtaccagttccatgtacggcgactcctgcgtcatggactcgttaaactccttccggatcttgtagtcgccaactttatccggtgggttatcgaaaaactcaaagaatgacaagtgcctgaggtcattgttccttggatatgggtctgagagttcaccgttccttgtatgaggttctgtgaggtcattccttgtatgatgttctgagaggtcattccttgtatgatgttctgagagatcattccttgggtaaggttctgacctggtgaaccttttaggcgctgcggagactttggtcccctttaccgatgagaatttactagtcaagtatgactttagtgaggaccaaaaattggctagtggagatttatttttacaagacttggcagagtcactggtaaaaaaggacttattgaacaaattactagaggaaaaaaatttgctagggaaaatattagaaaaaaacgatttaaacagattcttgggggaaaacggtctattgaacaaattatcagtaaaaaaagaatttagcctaaacgaagaattcagggtgaaggaagaacttaggctaaatgaattctcagtgtgtttgggtaacgaaattaaaggctcaaaattcctaatttcagaaggaattctgggcttatttatgaatttatatcctacaaaactgagtttgtaggagggaatcaggtgtatacagtggactaaattattaaaatatgcaaaaatgtaacataaaagtataatcacaggcgccctgcgccacttaggcgtaataccaaaaatcatacactacaacatcagtatatactggaaataattataaaacacgtttaaaaaataaaaagtacctaacatatccttccatacacaacactacagaaaacactaacattaatttattaaatttcaattaattgattataagctttttatttcattatttacagatccatagtttgttttatagttattatacacacttacgcccatcctatggtatgaaacaaatcatcaagtttaactgtgatttcttacacatcacagtttagatattataaactaaaaaaataatattaaaataatctattttccaccaaatttatgtaaaatttaatagttaaaaaaacgacatcacccctagccttcgtcaaatttaacgaatatatattccctaaattactctccaatttaatattctaagcgatataaacatatttacttaaaattaactgctataaaccgttttaaagcagattctaaagcccaatatgctttagtcggagttttcaaaatattacacttaaattcaagatgtgtacaaaagttgataatttttcgtttaatttaatttaaatattttttaaaaatgtgttataagatttctctttaaaatatattatgtgtaaaacttgagggatattatttaccttttccctctcaattagacagtttaaattttagtttaggatggtgaaacgtaaatatttgttatacttaattctactgaaatgtgtgtttgtacacactaagaacaggagaatatacagcatcagtccaagtctatcgcaactaagttcatttaaaatacccgaaaatacccttttcatgcacgcaaaacataaaaattcaataaaaaactcatcaagaagtaggaataatctaactttacacgaggacccaccagacgtttgttctacactattcttattttaccactaattacccattctatacttaattttaggacaattatcaacaaaacgataattatacccatgataataatgatacacatgatgataattatacccatgataataatgatgcgtataataataatgcggatagtaataatgacacgtataataataacgatgtggatgatgataagaaagaacaagataacacatttataaatgaaacccaaaatcaaagagatgaacctgaaaactacaatagaagtgatgaacctgaaaaccagggcgatttgaagaacacgtttgtggatgactttaatcagaacgttgatacaaatatgaaagaagactcacgggaaaataactctcttgctaatgaatatgaaccagaaaaagctcaggaacatcctgacgataataaggaaattgtcaacgacattgcgaaggaagagcaaatgaaaaatatgaatactgacgctggcgacatgattaattctgcaaaacaggcaaaggaacacgcagatgaacttcttaaccagtacaaagaaggcgaattcaacacggaaaccaacaaacacactcttcccaaaggtttacaactaacaaatatgaaataaactaaattttaattgtagatgacgctggaaatataataataacaaacacaacaacgacacccatgactaaacaggaggaaaaggcagatcctttaaaatcaattcgagatgctactattagtctctatgaacggtaagtgttttcaactaattaatgttcattttagagcgagacacaaaaacttgccagttccggatcctggcgatttatcatctccaggtactactataattattaactttgtttagaaaaaatatacacatcccttaatgcgctcgaatatattattgacggctacagatatactaaaattgatgtaaatgataagactgagcaatcggattcattaaacgaaaatagtcaaccagctgagacaaaagagccagaacaaatggacgaatctgaagtagatttaatggaaccagatcggttcctacagctaaaaaaatcatcagacgacgatgatgaaccagattctgaacaaaatgatgacaacgaggacgattttcataccactgaatatgacaatgaaatgaacgaatctgacaatgaaatgaacggatctgatgaggaatcatatgaatctgacaatggaatgaacgagtctgatgaggaatcatatgaatctgaatcagagaagtctaaaggaggtacaatatcagcgcatgaagcgatggaagatttaagggctgtaagtttcaactgttaaattgagtgtttaggtgttaaatcaactatcttcggtgctggaaaaggtggttcaggataacataggagtacgacacgttatcactaaacaaattatcacatctcaatattaaatttacactcagtcttacaaaatacgtgttccatacctaatatactatagagttagaatataatacacataatacttatcagatatgacaatagcatattttaatgtagtttctgatgagacatttttggaaaccagtgtcaacttgcagtgatatgcattctagagattcatgagtgctagataaaactatagtagcgaatcttcaaaaataggacataaactcaagcagcttctatgtttagttattggaatatttttgtgatatgaatcatttgccatagaaaatctcggcttttttttaattggctgatagttgtatataagtttaatatttgtgtttttaacatcgagtgaaacacttttgttattttggaaatcgattcttaaagttttattgacagtgtcaaatactatagcgtttgccaaatctctcccgtacacgtctttatattttcggtgaaagtttaacaaaacatgatattccatgccaactaaagtagtttgacacgattctaataaatcttctatatctcttgcgtatttttcataatgaaaatagaacttgtaatcagccaaattaaattttgcttcggttttattttcccatttatcagaggaattattccattgatataacgaataacttgtgtttttgtgtagtatggcgaaatatcgctctttgatacttctgatacaaactgacacagcccatgcacattcactttctttttcagccttccatatcactactttttcagaatttttcaaattggccatatcttggacctcagaaattttcaaattggccatatcttggacctcagaaattttcaaattggccatatcttggacctcagaattagatattgattcattatcacaagggattatactaggaaaatcaataattttattgattggctttactctacgagcaatgtaacgtttatcacataaattagtatacttgataacttctccattacgttctaaatagtaaaggtcaaaatcgctaccaaaaaccatataatcttcttgaaattcatcttcccttttactaaagtcgatagttattttattagtttcatcaaaatagtttaaattatataaaacataaacaaatccatgattttttattagttcaatccaagctattgtgccattaatttcatgaacaaacacgtgtattacatatttactcttttcgtttgtttcccaaatggttgtatcatttagcaatattttgttaattaagtaacctttaagacaagtgtataatcttcccggtggacctatagagagtgtaaattgatcagatgaattttcagtatctatatccaaagtcaccggagtcagcttgataacttctgaatcaaataaatcaagaaattcgttttctattgacattttacaatttcttataattttacagtttacttatagattcatagtataataattagattagactttagagatctcactagtatccactttttagatcccaggcaatatacattatatagtatacagacttaagatgtataatacatataataattataaaatatgacaatgtggttaaatatggattcagattaggtgttaatggtagtagtcaaagttaattttgtcctctaacaacccagttgtaggtaccagttacactgtcgtatatgaacaactctgggtagttataaccaggtctatgctcataaaccttatcgtcgaccaatatcttcttatcatttacattttgcttgaaaaggtatagaaaacgcatgtctgcatgacttacattgtagtctgtacgaagagcatttgggattctccctccccttctaacaccaaaccgatattagttggtatttttaccgatgtgcatttccaaccattgcctaaatcctcttcttcaaccatcctttctccatcttcaaccgtcctttcttcatgttcaaccatcctttctccatcttcaaccgtcctttcttcatgttcaaccatcctttctccatcttcaaccatcctttcttcagcgggaaaattttcggacgatctggatccttctccgggatgcctggaattgtcactgttggaactcattgcctcagtatttttacggctattttgttcaaccaatgttatttaagccggagtttttgggtgaagtttcttctgtttcggtctattgtatttgggttaactttacacagtgcttttcaattctgtgccacagtcaaatatactagaaatattgtatttatataagaattatactcgataattaactaaaaagaccaattatgttaatatatagaaacctttgttttggattgtcattttgcggtatatctactgattagttttgttacaatcaatagtgtttatacctagtttacgcttttgttacaagtaattttcacaaaggacttataggtttttctgtagaatacaattattcaaaatgaagcaccactattcggttcacaacctcagcattgtgatactctttaaaaacatattacttgccaatttgaccctaaacagacgtatttaacaagttattcaagaccggaatgatataaatacatgttttacctttaaaaaatattaaaatataaaattatactacacattagtgctgccaataagcagtagaaatgaccagaaagaatattatttctttttgttttgtttaattttatgtgttttagcaacgtttattttaaagttttccaaaattgaaagtttctcatgtccagactcactcgcaggcatcttcagatgtgaagacactatgcttgcgcggtctgcatcagagtctgccttgaacgattccttgcgatacgcttccctctttagagactcgtgagttgtaccagataaaactatagtcgccatgttcttgaggttggatagagaggttttacccaggtgagatatgccagaggtctgagcagcactgagatcaaatttagagccttcagcaaactctgaaagccttggcgcctcatagctccagtattggccaatgcctaactcacctgcagtctttggcggttcaaatcttaagtaccatttgctttgccaaggcatatcattacacatcagtgaaccataaatggatggggaattagaaccgtatccctttgattcggtgtaagtgaagttagaaccgccagatgagttactggtgtgaaaaaagtcagatttgaaggattctgaaaagtgccaatctttggtcaaatcttcaagggactgtcctgcgattacgtcactctttttactgtataacgatttgctcggcgtataaaataattccattatggaaaaaatttattccagcacaattcaaggcaattaagaatggaataaactttttattggatgattcctacatctaggaacaacacatttatgttaaaatataacaaattttaaaaaataatttaaaaaattaaagagaacagttttgataaattgtgaagtaacagaaatgtattttctgttccgtacatcaatgtggtgtcaactttctcatcaacatatatattttattaaaattatttaacaaatattgaaaatatatacaaaaatattattatgtcgtttcatttcacatttaaatattacgctaatagaataatgtagaattattttaaaatattttaaaaaagtttaaagatggcgagtactgatttcatatcaaaggtttgttcaattgacgggaataatttctgcgccgattgcggcagcagagcccctagatgggccagtgtaaatttaggagtgctcctttgtattaactgctctggcattcataggactctcggagtacatctgtcacaagtcaaatcactaaccttagataatctaaaacctgactggattaaggtaatttatacatatcatttatcccagttatttttatatccaagttatttttatatccaagttatttttatatccaagttatttttatatccaagttatttttatatccaatttatttttatatccaatttatttttatatccaagttatttttatttttaatggtttttagtcattattgagtatcggaaataatgtggcaaatgcctactatttgtacaagttacctcctgaggtatcaaggtactacgcctcagcctctccaaggttagtgaaaatgcaattaaacttgctcagtgatatggaaatttggattagaaacaaatatgaaaagaagctttacgccatggatggcctagacgaaccatttatactactctccaaaggtatttacccctatcacacaattgtggaataatgtggtcaggatacaacccgagagaatctgtgttaaacaggacactgcataaccagccggttcctcaatacaaacatagtccgaaacaaccgtacgttaataaatcgcaatgtaaattttagagtcgcggatttactgagtatcgacgaaaccttcggaacgcgttccaactacgaacagataaaatccaacctaaacgacggtctaaatccatcctatgttgatgatttcaaccctttttcaatagataacacccagaggacgaatgatattttttggcctaatgataaccagacacgttcatacaaggatgagcccagagaaacacttggagttccagatattcccgagcctgaggactctgacaagatacgagacgctaaaatcgacgcggccaaaaactccatcgccaaacttttccaaaacccaacccaaatcggattcaaaaatagttcctacaactccatagtaagccactccctttcacctacacaatacaatattaagtattcacttacaatattaagtattcacttacaatattaagtatacttacaatattaattgtgtagaaaccgaattgtgtatctggagacggattggactttgacagcactaacctgaaggataacttacagagtttaaacaggaatttgtaatctttaatgtaaatttatatttaaatgttaaaataaaattaaagttaaaattaaatatcagttttaaacttgggcattagtgattgaggattaataatcgccttcgtaggagtcctcgaggtattcgtggccttcgccttcaacttccttggcatgtttggccttgttaaccttaaggatgggaataacgcgttcgacgaccatgactttcggttcctttactattcgctccttggtaacgtactgaggaacgtcgacctccttttcaacgtactgtacctgcggaacctccacaatcttatcctcgtagataatcttagggacgtgcttaacacgctcaacgacaacttccttcttcttgtaaacaggcttgtactttacaacaggcacgtcaacgtccacatacttgtcaaccacctggacctcaggaacctcaacaatcttctcctcaacatactccttctccacctcaatcaccctagtctacacatatttagtcacacattagtcgtattagtagtgatttatgagtaattgtaaagtagttgtgagttaataagtatgggaaaactaattggggtgggttaataaattaataggaatgagtgtggtaagtacctgggtaatgggttcgagaatttgatagtgagtggcatcaagtccgttgagttcgttggtgttaacgccggcctcctctaaaactgttttgtggttgagaaaagtttcctcagcttccaaaaaatttgcgccagaacagcagtcaaacatatcctaaagaatggttagaataaggatataaagggtaaaatatggaatgtagttgtattgagtaaaaagctgggtgaacaaaaaagtgagtaatttggtacctatttgctgaaaatttttagtaaattaaaaattaaagctatcttctaaagtttaagacgacaactattacaattttctgaatatcaacgactctatgggcatgcatttgaccctcagcctaagcaccaaaatgcacactgcaggaggaatccaggctaaaacgactttatcctcaattaagataaaacaggctttaatttaaggctaaaatagaccaaatgtgtaaggcatgaaggtaccaacaagacccgaaagtttcaggtcaacaaacatgcctttacacattaaatttaaatgataaattaataaattaaatgggaaataaatacgataaaattaatttattaaggaaaaacttttgtgagaatggaatctcaccaactgggcctgacttccatgttaaaaacgtgtttcccgtcaagtgcggtgtttggcaaatttagccaattttcgtgaattgtcctagacttggtaaatgttccagaagtatacttgactatgtcgtacatatccaacatcataggctgaaaatgattaatgagcatataaagattaaataccggtttgtaattctttgggaatctcttcatccaggctgtcttccttatttttgtcctacgtttagaaggcttcttcttcggaacagcaaataaacgggttccatttctatacgttaaggatatgaagggagaagggactgaaacgtatgtgtaacacgagttaatcctttttttactattttgatgtcgagagatgtttaaggattccacaaaaaaaattaattttcctgttcttttatctttaaaatcgttagtcagatttatgtgcgataggcttctagttgttaaatttatcataaaatcaaatgaatagtacagtttcaaaaataataataacccaaaaatttgcataaattactgttacagcagaaggaactattttatggtctagaatacatatttaattgaattaatcatagcctagtgtaataagatcgtgtaaaagaatcttatagttggagaataataaataataccaatacagttaaaatggacaaattatgttaaaaattaataatacaatagaattagtaaaattatataaatagttgatacggataactacaccctataactaaatgaatataaagattataatataaatcatcaacaattatcagtttattactttttaattttacaaaatttaacatattcgatgacttcaagtttgttagttttacatatatttattaattcttacgtttttttatatgaaatttggttccaaggctaattttcattttctacttggtaataccaaatttttatctaaaaacgcaattagtccctgtgaaattcaaagatttaacccaaatttatcccaaatttacaatttcacaattttttctaaaggtttgtttatacttctggatctattttttcagaacaaattaaatcaaaaattaccattaaaataccacattggctggatatttcagattctagcagcgatctttcatttaatcctgtatcttccaaccccgaatctaacaaatttgacaacggatatgatcctgaagtattaactgacaaacccattgtttcagaggaaaagggtctaaaattgataaataagcagccgttgaagaagataagaccatttaaactaaacgagttaagtgtgttcaacactgatccgtataaattaataaaaccaataaggaagaacccagttctgaggcacatttggaaactgagagtaagctctgcatataggcgtggaatacaaaaaaggcttgtggtaggttcaaacataataaggcatatcctgacccacaccgaggccagatttgatactatcctgaccacaaacaaagaactcatcgatttcgtactctcaaatcctttactcaactgtagatattccagaatacaacttgtggataggtatactctacagtactgcttaaggggaactacgcactcatacctgtcatcagacgctattgctgatgcagcaattcccacaccaaatacaaatattactcccaggtaagttttagtcatatatatttggtaaagtgtttaatattggaatagatttgtcgttgccattgataatttgaaatacgcaagaaatattggttcaattattagaacctccttggcctttggtgttgatttgttattttacctaaacggaacaactgatccatttaactggaaagtttcagtatgcatttcttaattatttctattcacagctaatgatttctattcacagctaattgtattcccatctaatgatttattagtctgtaactggcggattacagtactcaattccttacagatttggtacaccacatataaccatataatatatatcaaagtgtggtatattatttgtaggtgacttgagtgacttgaggaagttttgtaagcagaacgagctggttccagtagttgctcacttggaaggagaaccattggaaacatttaaactctcaggtaaaggagtgtgcctaattctaggcaacgaatcccacggaccaaacccccaatcatttaactttgcccgcaggtattataactcattagtatactttctatacacatccatacttagtatttagtttacgaattattatacctacttagtatttagtttacgaattattatacctacctagtatttagtttacgaattattatacctacttagtattagtttatgaattattctagggtgtcactttatatgcatccgtttactgactcattaaacgtttcaatagccggcgctataataatacatcagctaaagtgcttacaattaagtcaagctgactagctcaacagttattcgtatgtataatcggatttaaatacaatgtcgttttcacgtaccacattcgatgaacaacctcaaaagtttatgctaaataacttaccaaatgactccatttcacatctaagatgggtattattcatattcaattacataattctacattttaacatattttacaattaattatataatttcattttttactgatttttagagtacaaccacaaaccccctgttactaacagctgggagttgggacaagactcttaggatttggaaagttaccacaggcctcgggaacgcagttaatacggatatggtatacacttttaaacaggacgctcccgtactctgctctgctttctccacagtatcttctatctacttcaattttacaactttactcaaaattattttataactttattattttacaactttatattatctaactttactcaatattatttaattattgagtatatttggtaacaggactcaatgcgtttatttggagggggctgtacaaataatgtgttagcgtatgatttaaataacccgagtagtacgggagtagtcatagcaaggcaccagaagccagttagtggagtacattggattccccagttcaacttactgttgtccacaagttgggatggcggtgtaagtttatgggatggaagacaagaaaacccagtgtggtcagagaacttgggcgctaaagttttcgcgtctgatgttaaggataatttaatgtgtgtagcagacagtaaccgaaagctcagtgtctggagtcttgagaagctccaacactccaacagtaaaataacaattgattccagtttaaagctccaaattcgagcattatcgctatttccagacactaaagtacgttcaggggttgcatacagctcaattggcggtcgctgtgtagtaaactactttacagaagaggaaaagaagaataatttctccttcaagtgtcataggcaggaccagcctggcaagggcacttttacatattcagtaaatgcaattgatttccacgcagtgtacggcactttcgtctcaggaggaggtgatggcacctttaccatctgggataaggataacaagtcgagagttaaggccttttccaatttaggagcaccggtagttgacgtcaagttcatgtcggaaggtaacctcctggcctttgccacaagctatgactggtacaaaggcctaaatcactcgttaataaccaacactagtaaatctatcggaatcgtcaaggtacttcataaccagttttcttccatcatttaactatcaatagatatttatctccaatatacataaacgataaaagtaaagataatttatattagttgaaggaagaagatataaagtccaagccgagaccctttggatcacgtagatgatttttaaattttctaaaaaatattctacaaaatttaaaaaattattttatatattaaattagtgatttaagcctggaaactgtttaaaactctattacggaggctatggtgtatataattagatccgggatgaaagtgctgtaaattgtgattattgtatgaaaaatggcataaaatgtgatgagaaaaaaatataatgtaaaaaattaagttggtgtgtaggaaataacagagtaaggggccaggtgtgtagtgttagagtcgtattggaatcccccccttaatttgtagttttatgattgtataaaaaatggaggagcgtaacaactggatagttaacacgagagtattgtacgattttataagctgtataaagttaccacagcaaccgctttcagtggaatttacacagacaactgttcagtaagtgtccacacatttcacggttcttcagccaagattataccgacgagatatcattccaacaaatcgcatgcggactgcaatatgaaacaaaagacgacgtttcaatttacattatcgatgtattcttagtattcctcactttgacttttaggtcgcactaccatctcagccactaaaggaagaactgaaaagatactgcaaatgcctagattatgaaggattccccctacctacaaacacccagttcccaatgtaccaatgtgtagcccaaataaaactcaacgacgacgttaacaggtttctcaactacccattccctattataatacattttttaatgtaaaatacccttggatatcaatttgttttatattagttatcttaatttagactttattaatttctactactttatttggaaattatataaactattatatcccatactgagtaaacaaataaaagtaaaatttaatgtagaatcttgtcgaaaaataaggacggaaacgtattattggcggcaaaatcaactgatggtaaggaatagtgaagaataagttactttagtgtatttgttcaacctgaaccagttggattaccaccaggaagtaaagagttagtttcacggtttataataagtgattagacttggaaccagtttgtaccttcactgggcatgaggatgaagggttagcttaaaatttttaactcttgatctatagctacggattatcattcaattcaaactccacaaatttggcctcgtgttctgaagacggacttatgttcatctacgacctcagcagtattacatagtttacaataattatatatttgggtttaatttttaatagaaaatgagcctgtgtacaattacaagcactcgggaggcctgaactgtatcgattactcaaagaccaacgaatccaactgttttgtggccaccgaagacggtcacgtcttactgtactgtttttctaattaaacgttgtatagggtcgatactaggcagaaaacatcacacctcaaggtaagaatatgcaaaattcaactcatttatataatcacttctgtacccagtgttaacattgtgaatagactaggaaagttgaaggtgctgaaaattcagtttcaacaactgttcataatccgaatgttttcgcatctggatcaactaaaggggtaggtttcgtgtgttttacattttcaggaaattcatttgtgggaccagagaaacctttctgagcctttgcactcaatttcagtccacaaagggccgatagtcaggctccacttcaatcagctgaacaaatcattgatatccagtggttctgaggacctgaccatctgtatccttgacctcgaatctgctggaaaagacgttgactcctccgaatacgatgaggaagatgaggaagacgacgctcccccggaacttattttcacccacacaggacatcaggataaggtgtacgatttcgtttggagtaaaaatcaggaaaccgaaaatgtatcaaatctttactctagaaactatactattagtgttaacatgtgctgaatatttcattagcttatcgcatcagtcggtgaggattactcactccaaatgtggcaaatggtaagttaaccactttggaaaatgtttagacgagtcagttgttggaagaatcaagtgattttgaaatggactaataaaattcacaatttcactgttattaacttaatactcgacagtaatataaatatcttatactatgaaattaaattagtcagattgtccagtgggttgctctagaacctcgacaaccgtgtttctttccgcatccactttaacgagtaaaaccagcctgctatccccaagtattgttgtgactgtcacagtagttagttgcttcctatcagtggcagagatatgcttatatccttcatctttgtgtgataaaattctcaagttattaaaaacaatatccccaagacagtattgagggaattgagaagggtacaggtaatgcttctttaaaaagtcactgaaattccaagtaatatcatacatggttgtattatatgctccaatattaaggtgcttctttgaggaaccgggctgcaccttggctagagaatcagtcatcggtccaaagaggtttgagccagggtccttttcacctacagaatgggtttcagattttgggccaagcaccagaacattgactggctcgtttggaggatgtgaaatgtaaataaattgatcttcgtcattatcagtcttcaaatcaaacattacatttccaataattattgaagattttgcagccctttttttaaaggccaaattggtaaaattaccatcagtaaaaagaagcttaaagttgtcaagcttatccaactttttacatgctttgtgtatctttggcgtattagtttttacaaactggttaagacataatacttgtacttcatcatccactgggttgtcaatcggtcccattttaccgtttgattcccttttatgccacactttcgaggtcagattaatcagttgaagtcgttcctcatcttccaaaaacttcctttcttggtactttgagccatctacactgtagaagaccctattttcgtacagaaacaactctctcatcatgacagttacatgtttggttgtcaagaactgagtacacagtgacgccattataaagcgctttccttctggaattttgaagttaaaattaccaaatttaagagctgtaactgttcccatacgattatcgatttccaaaccgtcaatatacctataaacaacgcactttccgcagttcaccttttctaaaaacgagtcatcagagggctggaaattgtccatatttaaaataaattctgaagatgaagcggggtttgagtcagacttgactcttctctctgggtaagtcttaagtttctggaaaaagttgtagtcatggaatggatataaaccactatcaaaaaattcttttttacatatataaaactgctcaactgtgattgacgaaatctgggatgaaacgacaatacgataatttttactagctcttgatatggattcggttttgggtacagacctggtgtagcaaatttcaaagctttccgctcccttgggtaaatcgagtttatattgattaaaggacagtttgtcgtacaaattattagtatttttaaacaacacacatcggaaatctaaaggtccagccttaactacttcagcgtcaacgtatccttcagttcccgataaatcgtccttggttacctctataaattgagcagatttagttttaggttcagaagtagtaacaatagctttagaaggtgtaacactaatttcagaactaggtgttacactaatttcagaactaggtgctacagtaatttcagaagaggcagcggtgtcatcagaagtagatgaaacaagctggtggtgagaatacaaggaaattgctctactgccagatgatgcaaatgtgggacgtgaagttccagctgaccgccgatgagttgtaggttcaggagtttggacagcaggtgtaacttcacgttgggttgaaggtgtagcttcaagttgggtggaaggtgtagcaggaggggtaggaccatataaagtaatagatctccctgttcctgcggttattggacgagtggtaaaaactgattgccgatcagctccagctccagtagcttcatctgtttcagactcgtgctccacgtctagtgctttaaaagattccaaagcaggctttcctaagacatctgaatcagactcaccttgaataacttctacaaacttaaaacatttcacatcgccaggcagagtcgcactagtctgtttataccttttggtgattttagacccttgcaaatcataattgattttaaccgtatactttaaattatcccgagataaactcatggttatattcttagcgaaggaacttagggatacacacctatccccaaagactatccttacatctttgccaaaaactattaaatcgtcaactgaaaattctttatcagtggaatttatagttttaacacttagccccaatgggtaatagtcatcagaatcatgaaacaggtcaaacacagcatagctgcgggtgccagtcaaattcagaggaagaatctcgtcataaattgagagagattggacaaaagttgcgattttagttaaaaaaattaatttgttaaaaaataaataaattaggaaaactacattcaagattttcatgatttaaggatatttagtagattttttccactatttattgcaataccgagttcgtttcttagataaaggagtaaaatccaggaaaaactggaaaaacaaaagtcacgtctgatcattaattaaaataaaaatattactctaatgtgtgaaagatttcgaggttaatctcgcctgatatataatgggcattaaaacacagattcacaatattttaactaaaatttcttttaaataatgaatatttattaattaattaaaaaatgtatttatattaatttttcaagattttcgctaaaactacaaatccattagtacatttatataaatgtgtatttatttagattagaatattatttttataaaattcagcttctcaaattaaaattaagaaactgacattatcaaatttattttttgaaaatttcaagtcctttgtgcgatttgtagtcaatatcctttaagtctagcatttcaaaggtatcactcatgagtttgtaggcctttactagagatttgttgacagttttagttgctattactattaatagttctgactcatttttcgatacaaatacctgcttagcaagttgtttaggaacccccttgataataacagttttgtactttacgttgttgataacacgtttggatttagaaatcgttgtgtaaacagttgtatttttgtctatttccagcttcaaaattgaactatcaattccagtaccgtctattactaaatctattggaaatatctcttctatatatcctatcatacttaacaggtttcgatttaccactgatgattctaggttagaaagtattccccagttaatcctaacacctggtcttttaatttcataagtagaatcactattatcgtgtttttgagatacagttttcagagaacctgctgacttgtacgtcatcaaaaagacacaggttttaacatttgagtagggatatctgacccagatgtgatatcttgttttttgacagttaatggtatgagtttgttcaccaaactttatttcaaattttttagacctagtatatcctgtaaagtagtaataatcatcattcaatatcatataccttaaatctagtggatactttccttcattaaaatctaaaacttcctgttctgattgattcattgttcgctcaaacatgtcaaccgaattatcaatgaatggtatttttggatcttcggcaagtttatattcatctgaattgggtgaaatttgagtaaagatcaaggttccctttttattatcagaaaacatggcctctatacttattgaaacaaggttaccgttaatagacctggttacatcgacttttgaaaaactaccaataagcttgatttcatgccttccaaagatgatcgggtttaacactttagtactagatttgtaaatttttataatatttgcaccaaccttggtttttgtaacggaaatacctggcaagtacacactttcgattagtaaggggatttcaggggtttgactactctcgctactatcttcataattatcacgtctaaattccttatatccactatcatctttatgacaatagaaagaataaatacctttatgagataacataaaaattttgtagaggtaatcgttattttgatcctttagtctaaaaatttgcatccatttatgtttggtaagaactttgtaatcattatcataggcagtcaattcacctggattaagaattaaatcattgtctgagtaataaactgtcatattatcaacgtcaaattcacatacatcaattttggggtagtcaaaattcattttaacaggcagagtattggggtataaatcatgaagtgaatcgtacaacttctttgccatagactctagatttaattcatttattgaatattctattttagcgttagacattaataatacttcatcatttttatggtttattttataaagctcccttcttatctcatttttaagtactgtatcaattaaaagaaaagtatgttccatgtacataattttggacactaaaggccagccgcttttgatctcaaatatcttatttttagttagaactttctctattctttttccgtactgagtcttaaaaaccacaacattataggatggtattaaaacctcaatatcgtcagacacataggagtcgtttaggtttaacgtgagatttatccattcattgttaatattcaggtttaaaacttcaattaaatttacattagagatgtcttctcccattttattagttggagtaatttcaaactcgtgagaagccttctgtttaaaaattgttaaatctttatttatatgagaaattactacaaactttgagttttgaccttcacaataaaaaacttgagagttgaaatcaaaaggtatgtcaagtgtctgagagtctagttttagctttttgaatacgttgtactttgaatacaaacttgaataaacagttacatgatcattgtattttgctactaaaatatgacctttatccaattgttttaaatctaactccataaattctaaatttggatatttttcttcatttgatccttcacctgagctttggttatccttaaggaacgaaaaaatcatataatgaggcgataagaaattttccataaatgatctggtatttgtttcgtaaaaccactcgattgtatcattatattcactctttgtagagttaggtttctccatatttatagtatgaaatccaatggtttcataacccaaggctgaaaaacttagaaaatattcatcaccatattttttaacgcttaatagttgaaagctatctattggctcgtgttttaaaattgtgttacccttagcatgatgaatttggacatattccattaagttggtagtgtttaattcccttggcctcagtgtatagtgatctgactgtgtatacaagtgtaaactcagtttatcaatattatctggtacatttttattatgtaaatcaaaatttagcctaaatttgttgtaatttctagacgaaacaggtggagaatcactacctggagtcccaatactaacattttgatcaaagggaatgccaaatgactcataacttttaaactcttttcgatcttgagagatacatttattataactacaagtccaaccagtacctataagttggcaaataactacgtaagatgtgttaattttaccatcggtttcagtacaataatgccaaacaattaaatcgttgaaaccttttgaaatagtgaaaggagtgtctgagaaaataacttcactcaaattagtaattttaccattttcggcctttaaataataataataaccttttgaaaacctaaccctcgatataaagggaggaagcgataagagatatatatttagtttaaatatcgttttatcttggttaaatttagaccaattaaaattaataaatgattttagaaatgtttccttttcatttagtattctatcataccaccacgcacatgacctttctctaaaaattcgtctcattatcctattgccatcctggttaaatgattctatctgaatgcatttccgattcttttcgtctacatatgttaaaactgttcgataggtatattttaggtcacactgtaatttcctgcaataaaaatttacacatccaattgtgtatttgctataatcttctttctcggtagatttgacctcatataactttatttttgttctcatattggttttatcatcatctaaatcagtaactgttataaacctgccgtgctctttactagcgaggtcaagtttaacatatttaccagctactatatcatcagttgtgcaatattttttataatttccacatttaacttgaaataaataacccactgaaccaaaaaagtagccaatttgcttcattcccctccacattaggggagcgagacaaattgtactaagtgccgtggtacccagacacaataagcctgaaaccggtttataattctggataaggatgctaaaactgagtagaatcaggagaagactcttcctgagattcctcatttgcccgttgcttgtgaatatggatttatatgaagattctcatgtttatataatatacggttaataactaactaaacaaatataaatttaagggcagtattacacatggaaggcggttttataattgttttattccattgcaaattagtgcattttatatactttcatttattacataatattaagcaaaccttttagcaattgattgttattattgagtttataataattttacagtattatatcgtcaatcttactagaataatattatttaaatactgcctaacacagtgtgtatgtaatgccaacagcactataccgtataccaatattttcacgaattaaattaaaatttacaaattatttgggattaaacagtgtttttactaatttgtcgtatttggtattatctgaaaggagagatttgagtgtgtttaccaactcggatcttttaactgttaaatcttctaatctttcttcctcattataacttaacctcttaatcttcacagtgtcagtttctagctcagaatctccaaccaacaccatcaatgatactcctatataattattaacatataagatatgtgataaatgaaaaatgtgtaaatagttacctttatctgtagcggcatccagctgtttacgtagatttgcatttatattatatagaaattcagctctgatcccatggctccacaacattccgaccagtttcatcctttcaaaaaacatttgaggggaacctacagagcacacaaaaacgtctgtcaagtcaccagagttctgctttggcattgttctaaatagtctttcaattcctactgacattcctaccgcaggcacgtttttgccagaaaacattccaataagtccatcatatctccctcctgctcctaccgatccaacctcttcgtcttttaaaaaggcttcaaatataactcctgtgtagtaatctaatcctcttgcaaggctcatgtcaaacatcacctcactttctttaactccaaacgcttctaaataggaccacaacaaagccatttcatccaaaacattaccatctgatttgtccttaacactagtaactgagctatcctttgtgagtgttgtgacatttttatccctcagtttttctaaaacttcggtgaacgtcccgttaatctcaataaactctttaatcttatctgcaatgtattctggtagtcccttttcacttgtcatttcaagcttaactttatcccagggcagtttgtccagtttatcaatagagctacaaatagttctgtgcattgaaacttcaactccgcagtgcaaaagcacagcatcaagaattgctctgtggttcactctaacggcaaaggagccacccttaagaagtctaagcaccctaactaggatgaaaataatctcagcgtctgggaccattttggggtattcacccgcgcagtccaagtcacactggtaaaattccctataccttcctcttgcaagttgtggctcatctcttctgtaaaccttccctatatgaaaacgcttaatcttttccatcttattcattgccacaaatcttgcaaatggcactgttaaatcgtatctgagtgatagttgttcacctccttgatcttttaaatcaaaaattaacttctggtcctctccgtactttcctaacaaagtctcctttaactcgaaaactggcgtttctatttcaaccgctccgtgttgtctgaaaatgtcctttattgaactgattactactctccttgtgagtacctcgtttgggcaaaagtccatcgttccctttggcaactttgggagcctagttttctggttctgaggtaccaaaagagcttcaaatttattacaaaggctaagaagactgcttccactaagtgtacgtgatagtgtatcccacactcctgagtcacagtacttaactcctttacacacttccttatccaaaaaatctttgtataattcgtttccatgacctaaaactgacttttgcacctgtttactcgatttagccttcttttcatatgctttctggtcattaagctccttcaaattaagcatatttactgaaacgcacaaactaagactagagtaatcattgtacaaatcagccaggtattctagcgatgtaagtgttggttttggtaagttattccacttttctttaaaacttgaaaacaattcattatacttattcaaggacttttctaaactttcaacactaagcccgtcaacgcaattttccactccctaaaatcaatatttattatttaaactagatttaactgtataaaaccttacattattgtatgattctgagtatttagagaacacaagagggagtatttcgttatagagaacaacaacattttttaaagaatataacaaagcgttaagctgtgaatctaatgaggcgctccatgctttatcaactacattttgcaattctacacattgttaaaattataaattatttgggtagagagtacctggttgtactagatttgagcagagtgatgaaaacattttggatacttccttaagaattgattgagatagagatctcagctcagaggtatgtaccaattgagttgaaattagtgattttaaattcttatctccaccctaaattcatggtaaaattgtatttatatgttaataactatgtaatttaccttttttggaatgagtttactgtcttcagttagccagagtatattcctcacagtctccataacgttaggaatcttctggagttcgggaaggagtagaaaatcatatggcactgagattgattcgcacagtaatcccatattcaaatcactcaaatttgacattgttttcagaagtgaacccaagactgagacgttggataaaaattcagtttgtgagttaactagagagttaagttcatcagacgataatccaacctccttttgcaatatttctgatgggttatttaagtcagactttggcgatgtaactgtagataacattctaggtattcctggagattgggtgtaggataaatctccattataaagagttttatcagaagggaatctcttaaagttagagtttgtgtttagagctttaaccaatttggttataaacagtgaattaggctttggcttccatctaagtgcttgctgaagtatgttacaacaaatcattcttgattttaaatattctctatcgacaaaagaaaggtcaaaatcagtgctattattacattttggagttgaatttatttcttccaagtttaagttgatttttttagccagttcaggctcgattgagatgtaaacttttgataaacctaccaaacacaaatcatcaattgacaacaatttgttgcaatccaaggtcaaatatgtcatatttaactcttaaaacaatataaatatacttcatatatttttttatacatatttaagttataaattaatttattatgtgattttttataaaattgcaacatggggaatcacttcgaaattttactttgaatatcatggattttttagataaaaatccagataataatacctcaatatcgcaacacttagataattcaaatttgaagtggaaggatgttgatatcccaggagatttgttttctgaaggattaatttccttagaagttcttgataatgcacaaaatcatcaagattcaaaaacaaattcagtaaaacccatttcgaaggttagaaatcacaaacaaaagcccgaaaatgataaaatacctcaacaaaaagaagtaacaatcgattatgaagaagttaataaaaaaaccaaaccttggattaacgttttaggccaagattacacaattccacaacaaattctcgtaaatttatataaaaataacttcaacacacccacacctatacaaagattaactctagtcccctctattgtacacaaaaaccatatattaatatcctctgaaacggtattttctatttatacattaacctatataaatatatataaagttggcgtttattctgctgattagggctcggggaaaacattatgtttcgtactaccaattgtaatatcactcttatctcaaaaaactgagaataaaattgaggctttggtaattttaccaacaagggaactagcagttcaagttaaaaagatattctttatgattttagaaggagttgatattagagtactttccattataggaggaatttctgtccaaaaacaggaacgattactgaagaaagacccaagtatagttgttgcaactcctggtagactgcatgatttcgtgaacgatggcaaacttagaggtctattccagcttagatatttggttttggacgaagttgacaagttttttgaggataactcatacaaggacgttcagttaattgtaaaatatgtaaaaaattcaaaaattcagtactttctaagttcagcaactattttaaatgtaactttctatttacaaccatttacaaatacatgacttataaatattctctacagatgaaggaagacttgaatgggttatttaagctccttagtataactaatcccacagtgtgcatatgttcaaaggataaccagttatcaataccttacgacaagttgacgaacaaggtattatacaaaaagttatacgcaaggtcactaacgaaagttttaatgccggaaaatttaacatttcaactccttgaatctgaagataaatataaagtaatttaaataataattatttaacattatcaacggtaataaaatactaatgaatttgtaggaagttaggttggtgggatatttggtagattatttgtgcaattttgagtcaaaaaagtgtataatattcgttaacacgatcacttacgtgtacagactagagtctctactaaggtattttacaactcacacatatttttcagcttaattttctggaaggatttacatgaactaagacttaagaggaagtactgcgctacctttgatcttgataccaagttggactacgtcgcaggaatacactcaagacttaggcaaaaacaaagattaaaccgtttagaaaagtattttaatcgccagataactaaaacatattcaaatatttataattttaaaatattatcttaggttcagctctaataaaaagtccattttgatatgcaccgatgtagcgtctagaggattagatataccaaatattgacattgtgatccacttctacccaccaaaaaacaaatcactctttttacaccgatcaggaagaacagcacgacttaaatcagatggtaattcttacacaatttttattctattttactattcacttgttaatatgattacaggagtatcggtgtgcttttgcaccccaaatgaccgagagttatggaagaagttgttcacggcgataaataaaaacgtggataaaattgataaaattgaggaaattccacgagataagttcatgagtatgtttaaacttggagttacttaacaaattaatcatataacacatgtaaattgtacatgacggtatagagcttaaggatttgttacaactggcggaagttatagaaaagagcgaattcaaggtacttctcaaataaataatcaattatactcaattttagatgtcgaaggaaaagagtattcaaagctggttccaaaatgctgctagaagggctgaaataattcttagtgacgatgaatccgaggaagaaaccaagaggcagaggagttataaagctatgaaatctgagaagagaaagcttttaaaggtatttcaaacatttatttaattttatagattcggtccgagtttggaatcgacaactaataatagtgaatttaattttctataaattattatacacatttcaattatacagtgaaatttcaatatatttagaatttaattgctcaaaaatgaattaattttcaatatatattttaaacttgagaatatctcaacagccttgagttaccctatcacttgtaaaattgataaactaaaatctaagttcataaatagtagatttagggaaataaatgtagaaatgaagttaaatgttatgtttttacacgggcttatgcaaacgactgaaatgctctcagagagcttctcaaacttaaacaaaagcctatcaaggatgttgaatgtaacatatttaaaagcgccttttgagttgacggaattcccagcgttttgtaaaatgtccagtgaaaagactgatgaggaggttaggaagttagagaaaagtatcagggcaaattattatagtagaaagggcagaaagaacacatatggagggacttggttctttacagactttgacggaaattattcaccgcagctaagaaatgttaaaatcatcggactggaggaatcacttgattttgtgttaaatgagtgtaaaagaacaaattgtgacgggcttttaggtttcagtcaaggttccttaatctcaacaattttagctaaaaaaacattaaatgacccaagtttgggctggaaggctaaattttgtatactttttagttcaccgatgccttatgcaacatcactgagcacctttctagcctcaggagataaaattcaaacaccttccttacacattttggggaagagcgatattatggttcctaaccatagatctctattattatctgaatgttttgtgaatcctattgtacattatcatgaggggggtcacgatgttcctcactttgacgatatttcagtttatgagaattttttatctaaatttctgtaattaatgtatttttaataatttcttagtttattatttatatttttatgtccagaagattagctaattttaaacttcctaacatagttactcctaagccgagaactggtgctaggagaacatcaagagaaaaaaaggaagatgagtctcaggacaagtacacatcagcttattctttgctacaaacctcttataaaatttctgaggaggattacaggaaatacggagttgaacatggtcttcttcctccttatttgtccaatccagattcttttaaagtagattccagaaatctttacacttcatttgataactgtaacatatataatgtcggctcagtcgtaaaacttgatacaaatgatctatttaatgaacttccggaaggactttgcggtatcagctctcagttcttgtttataccattcataattcttaattaattcgctcttataatttcatcaggtgatatgcttaaggatatatctcttttacctgagtctgagcctctgggattacttaatcgcaagcctgcagtggagataatatctcagttaaagcagtactctcagggcagttcggagtcattgagatcgagaggtattttattggatggaaagagaggctcaggaaaggttagttttccatataactttgtttttatagagttttatcctaaatcacgtttcattgtgggcacggaggaacggctggatggttattcatgaaccttgtgcctccaaatactccactgaagttggcaccattaaaagatcaaacgccggtgtttacatccaggtttaacttttcattaatttttttacacataaaataatatttatcacagttagaatttgctagaacatttttggagcgacttttgatgaagaacgagcaacatttatccgaaattccagtaataaaatcactgtatggcaatatttcactggatggaaactacttaaagtacagtaaacggatgtttgatccagtcattgagaagataatccaggaagaattggaaatcttgaaagaagattctgatcctgacgtaatctttgaaaatatatttaatcattttatcttaggaattagaatgcaccagagagaagctaaagttgtggcacagttatagaaaacagttcagaatacccgttttatcgttagattttaatatctatatactattaaattatagtgatcgccttcaaaacccgttaaaactggtagatatcgcaaattttggtgttaataatgaaaccttcgccaatcaagccgtttacgagatttttaatcagctaaagcaccagaccaagttccccttactcttcataataggtattttaaccttgatcatattgacttttttaaatagatgagtacaatgagtgcttcactgcctcggaatacctctcgattaagtatgagaatactaagtttaatggttggattccaagttaccacttaaccatgccgagattatttcacaaatttgacggagatcactacagaaatggtattcatccactcacctcctaacactagatattttgtaactagtttcttttatttataggatttaaaatattagcaacaagttggtcaaagcgcaagagaaagaaatttaggcctgaatacctgggaattctgttagttttaggatttaatattcttttagccccaatgaagttaggactgtccgtaacttcacttccagggagtttgcaaactatatcttaaacttgaaaaatactcgtgtaatttataacttccctaatgacaaaatcaattatttctacatgctaacaggtatttttacaactttaactttctttaaaggcggaaatgggttcgaatccaggagattactttccaaactttactaattttactgtacaatacctatacatacatatatatatcaatttgtaaacatattattgtttgaaaaatgtttagttttctggtaattttaaagtaaaaaattcatgctgcattgcttcttccggtgttggtcttttattcgagtctaaatttagtatatatctgataaattctccaaaaagtctgtgttcaggctttaccaaatcctacaaacggttagaatttgaaaacatttatttatggattcacatggatgtataagaaagataccattatggttttacactcttcaactctgtgaactgatgattttgattttgcgccttcaggcctaaaaattatttataaaaataaaaatatatggatggatagagttttgtgtggtaccagttgagtctgggttcatttggactaatgtagttttttccttgagtatttttagcagaatttataacttcttctgggaatttcccgagagtcttttcctaatcacaaatgataataatattgaatattgtaccatcattgccaagtgttccatgtgactgtgtgttctaaagagtaaatgtcctgtgtacaactccattagtgtacatcctaatgaccacagatcactcgagtagctccatccaatatctacacacatcatcattccaatatcataggacataaaactagaatattttgataacttatataactataggggttggtgtaaattagtacctagaataacttctggtgctctgtactgtcttgtattaataattgagctgtgatactcatcttcataaatagcgcttccaaagtcaattagtttaatatctgacatagctggtcttttagtcgtcatcccagtctaaccattattaatataaattgataacataattaattatattattaatagtataattagttagataattagaatgtgtagaaaaatacatgtgatcttggaaatggtacttctatgaaatcatcttttccacatactagcagtatattctcaggtttaatatctgtgtggactaggcgttttttcttaagaaacgaaagtcccttcagaagctgataggccatgttctgtatatctgaaatgaaaaagcctttaaaatcatttttttccaaaaaatcgtatagtgaagggccaagtttctcgaaaaccaaacacatgtttctgttcctgtacataaagttgtcatgtaaaaccacgcaatgactctcggaattaacgtccgagctctttatatccaaaagtatatctgcctcaatctttgccgattgagtgtatttgtcgacgtccctcacaaccttgactgcaaattgtttgccttccttttcacataataacactctaccgaatgttccgtcactcactttattcaagaccacgtactctgataaattcatacccttgtcccacttgaaatggataatttcatccgtgggtgacttggctctgtcagcatacttatccctaccactatacctgtgcctatggctgtacctatctctatgtgagtatttgtgcctatgtgacggggagtagctgcgtctatatcttcttctataagatcttgagtaatcacgtctatgggagtatcttctacttggtctgtgagatcttctactataccttctgtctctatatctatacctatctctgcttctatctctatgcctatggctatatttattatggttccggtaacgacgacgatctaggcttgagctccctgagtatcttctatggttcctatcgctataactcctggtatcactttctgaggaatccttgctacttttactacggctccgatgaatggaatcactgggttcagtggtattatgagttgaacttctactgtaggaaggggaactggaataacttttatgtctggaatgtttgcgtcgtttatgcctataattagaggaatggtacatacggcggctactatattttctacggctcgaccttctacggtcatttattctactggaatctcgtttgcgataatatccatcttcggaatttaatttttcattatcatacattttattttcgtcatcatagtgggtcatatctaagaaatctaaaaaataaattaaatttcgagtatgttgtggtggagcctgaactggctactaacttcattacagtaaatattattatgagtttaacttggagtgaatctgacgtaaataatctaataaagtttgcaaaacagtctttcaacaacaatgatcgggctaatttggaaaaatgtgtaaggtaaatcccagcggttacaactgttcatcagttatttagaaacggatcttgttcggaatactctccacattcagattctttaaagttagacaaaaatcaaaataataattttaaaaggggtgaaggtattttaatcctgatcattttgtttagatgatctggttggtcaactgttagatgacctttggtcttcttatggtaaaatttcactttttctagaagaagtcattgaatcagcatcagctacatacagaaatatagtcaataaaggcgtaaaacgtatgtttagatattaatagagttcaaaatgacattagaaggcctctctttaccttcagattctgattataacattgcttttctctcctggaaaaaccagttaaacaaatatttgaagcgatatgtaatacagcaacttcagagtgaatccattaaaatgtcccgtcaaggatccttattttcattaagtacgttatacataccttattactaaagtattatatagtggcacataatttactatattaagagtaacttagtccataattgattagaaaatgagtataataacttcgacggggaaacaatcagtaatttgatgttcaactcattcacagttgtaaacaattttactggccaaagcgttagtttcctacaagtttattattttccagtccaatggcacctttagtgagttagagtttatggaatacaacggattattcaagagggtaaattttttagtattttaacatcattctaaggttgaaaagagtaccgacctgttctatgataactgttttgttttatggttaaattcttcccagttggacaaaactaaacataaagtattttccaacctgaattatcttaatttattgtttcagaatactaagatggtattggaaaaattatgtgaaataccttacgaattgacgaataaatgtaaaatactacttcaagtatctctttatctagtccataattatcaggtaatatcttctgtgtgcgtaacatacatggaggccggtaaatcttcaattatgcctcatgttgacggagagttagtaaatagttaatttaattgttcagaaacaacggcgttcaattcacttgtttatatgtaccaaaatcacctccagactcatcaattgacataacaataaaccaaaatactcacaccgtaaacttccaaaatgaccaactgataatacttgggtatctttactatttagcatatccttgataaacaaattcgtatgagttacataccattggaataccatattcttactacatttctataataattattagtaaaaatgtgaaatacgagattaaaaaggtaaaggaaaaatgcttcatatttatggcatggttaactggtccagactagatcacacgtttcctctttctaatctttatacgctttgttttatactgtttccagtacataccggcatccctcttctttattccaattttccctattattttatttagctgctgtcttcttagatcgtccagcgctgagcactctatccaattgaagtaattatacacattgttaatatttgattctagaagtttgggtgtgttaagatataaattaggtgctgtaattttatgattggttaaattgagaacgttgttttttactaagtaaaaacttttcaaattaaaaatggaattttttgcgattgaatttaataggttaaaagaatctaaaataaacataatgtattaattgattctattctagtaccacacaacaacaagagaaatgagatgttaatttaaagtattttttgaccttctcaagttctatacatttaaaaataacatattattccagtgtgtaacataaatatcataaaataggtgttaaagggagtcttacaaaatttatttaaaattaaaactttaattaaagattggtcatcttgaagaatttataatcctttttacggcctctttatttattcgaaccttattaacccttttccctaaaatatcaatgtcagggttaactaagaatagggttgttttaaatattaagttaatgtatataccctgagtttgtttgtcattgatttgtttcatataacatttgattcgattctgtaaggaaattaaactttttaaataaaataccaaattgttagatactggatgagagccgacattccctccttctagcttaagttttactaaatacattgatgtgttgtatacaaaattagttataataaaaaatgagataaatatactatactatattctatattaatataatatatatatgatggtgtatgttaatactgtagtgaagggaacaaagaacgaaagccatagtggagcaaaatttagcatattctagtcctaaaatattattaaattaagctaaattaaaatataatagagtaagatgagaaattaccagaggtattactcttaaatttgttaaaattaacagaatttagaagttggttgagatgctttagaaatgtgtttgaattatactcaagtttagataaagatttctcgaaaccgatcgcacttggaccagcttccattttataaaaaaacaaaaatacaaaagtgatgaaataaaccaacataatttccccaacccttattaaaaccaccagaccgttgtcttcattttacacttattttatttttttgatatttttttaaaaaattattatgatgtttgttacctattaacattattcaacgatgggtgtatttagtaaaataggaagggtctcccctgatgtttcaacgcttattgttaataaatgtgccaggagaacattgtttactaatcgtcacaattatgtgtctaatccaaggttcaacctgacccttaaaaggaacgtcacaacttctttggcgactgacctttttaaggattccaaattacatccaaacgcgttaaatcaacccccctgccgtacctttatatagcatttaaatcgaatttttagatgttaccacacttaaaaatgggcttagagttgccactgtttggatgccaggctcctcatctaccgttggagtctggatagatagcggaagccgatttgaaacacccgagacaaacggttctgcacattttcttgaacatatgatttttaaagtaaccatatcacctatttatgaataattaattttaaaataccgataaccttttttgtttcaggggacaaagtcacgttcaaggcaccagttggaagaacaaattgaacacaaaggcgcacacttaaacgcatatacctcaagagaacagacagcgtatgccctagtcaaaccctttttctacttctatatataaccagttatatgccgtgtaatatatgttactaggtactatgcaaggtgttttaataatgatatcccttggtgtaccgagttgttgagcgatattttgcaaaacagcttaattgacccagaccacatggagaatgagaagcatgtcattctgcgtgaaatggaagaagtagaaaagtcacacgatgaggttgtctttgatcgattacacatgacggtatgttacaattccactattaatacttaggcatttcgggactgttcactgggattcactattctggtatttttgtcatttttatacacatacaacaaactactttttatatataatattagatataacctgtctagtattatatatactagtgtataaaggaattttagggcccagttgaaaatataaagaatatgcaacgtgagtatctcttggactatattaatcgaaattacacagccgacaggatggtattttatacccccattataatttcacaggttctttgtgctgttggtaattttgaacacgataagttcgtctcattggctgaaaaacacttctcaaccgtaagtttattaaccctagtctttgtaccctcatacataaaattataccactattttcacaatattctatgaaataatatatttgatatagtattttattaaggttatattaatttgtgattagatacctaaggcagtgactaaggttgagttggagaagccatattttgttggctctgaactattagaaagaaacgacgaaatgggaccttacgctcatatagcagttgcacttgaaggggtgccatggaactcacccgattctgtggctttcatgctaatgcaaagcatcatcggcacctataataaatctaacgaaggcgtagtcccaggtaatttttccatttcattaacaccttaaactctaaactttttggtgcccctaatatttcccacaaacaaagataatatgattatagggaaagtgtctggaaataaaacaattcatgccgtggcgaacaggatgacagttggctgcgctgagttttttagcgcatttaacacttgctacaaggatactggcctgtttggattctacgctaaagccgacgaagtagcagttgaccactgcgtgggagaattgctcttcggaatcacatccctttcatactcagtaattacatatttaacacagtcaaatatatttataacgcagttatgtattctcaaattcagttaaatacatttatttatatatttttttatatatgttggagtgttgaataataatatgagtaggtgactgatgaggaggtggagcgggctaagagacagttaatgttacagtttctctcaatgacggagtcgacatcaagtgtcgcagaggaagttgccaggcaaattctcgtatatggaagaagaatgcccgtcgcagaatttctcctcagacttgaaaaaatcgacgctgaagaagttaaacgagttgcctggaaatacttgcacgactcagtaatttttatatatcaatttactctcgatttagatatatttagcattatctctataatttgactattatgtgttttaggaggttgccgtgagcgcaatgggaccattgcatggaatgccatctctagttgatctaaggcaaaaaacttattggcttagatattaatttactacgctcaacttatatcattaaagttaactatctacagaccatataatgtggttgatttaaagttcatttgttattatgagatcaagtcggtacaattttgacttaatataatattatatggtaaataatatatatgagcaacattgtgctaattacatttattaataatataataattattaaagtccatcaacggtagggccaaagggcccctagataatttagtaacattcttgcgaaagtccaatccatactggagacagcagctggaaatagattcatccatgagttgatcctcgatatactttacaacgctcactgggtccatatcatccatcaacttatctaagtaatttctaaaattattagcaccatttataccactagtacaattagaagtactttgaatcttattgagagaagtgaaaatgcgtgaaatagaagaggagaaatccagaatgtttttaaaacagtctgtgagtgatgggaaaaggtgggactttatgttctttttgaacttcgagagcgagtcacggagattgctgaggtccttggagcgttgaacatcctctttaaatatgttaaagtggaatttaacatcatgaaaaggctgtactgaaaacatgaaacttatcatctcactcctgtaaaagttaatcttgttaaaaaacgaggaaaggtctaaaatgccagtgctgagtctataaaaccaaatatagtctagaaatatcctgttgaggctatcaacagcagcattaaaaagacttgacaaagacatcaaactattaataaaatcgtaactatcatcaaataacaaactataagggaatgaacggataagttccaagttgtctcttagattcccgagtccttccaccaatttactactatccattgccttgttcaagatattatttgtgtaattactcgtgtaatctttcttagggcaaggattgggaattatactatacaacagagaattgttaatgaagtcaagtagttgatagtcttttatcaaagtagatgcaatatcttcagagtatctaaggcccgagactatattctttaaggttgttaaagtatattctaaactccattcttcattatccttaacttcatcaaccgtattaactgtattaacagaggtagtattagtgttaccattagtatgtgtggcgttattttgtagttggctcaatgctgattggaggtttagaagttgaagaaaagagtttagagtaggagtaggaagattagattttttcaacctctttaactggttaaaaagtagtcccttttcaaaaatatcctcagcaagggttttgggaaagaagtgaaataacttagaagaatcaaatgtgaaacatccgtctgaaaaattgatgaaaaagcccatattagaagcaactgaggacaactctccggagtacaaccaccggaaaataacctcaaagaaagggaccaaggacttctttaataagcgtaaatatagcccacgatgctcataattcccagtaaatgttaatctatacagagcgtttggagaaacatggtcacaagttaccaatgagtaaattattctaattttacggtaaggtttatggagtaatgaatacaactgcaaaagggttaaataatccccgaaatttaatagcaacaagtccaaaagcttggcgtaaccagtcaactcctcaacaatggcctggagcaaacaattcagaatcgggtcggcatttttaattccacttaaattattgtacaatttttgtaaattattagaatttttaagattatactggctttgtaaactatgtgaattagtgggatttgaagagtttaattgattaaggtacagtttaacagtattatacaaatcagcaacaaaaatgattttgctgataacaaatttaaaatcggaggagattttaagggtaggattgaccaaagaatagtaagttctcattcttttaaagtatttaccatcaactcctttaaggagataaagcatatccaaaaccaagtcgccctctgctaaaacgttatcatcaacactaaccaagctatatggagagtctgactcagacatttctgtaccattaaccacataactcaaatcattcttgtcacttggtatgttactatcatccaacacattcgtatcactccgtttattatcaactgtttgattattattataacttggtaggttaatattggttggagtgaatgcggtatcagactcaagtatgagtggagaataatacaattggcgtaattgagatgataaaaactcatccaacattaactcttcactcttttccttattaatttgaaagtcattagaaggaacatcaggtaaggggttattagtaaattggccatcaagaaagcaagccttatccctaagaagaaacaaaagttgtaagaccgaggagaagtctttagatccaagagtaacactcataacaatttcgttaacatactcgaatggaattttatttttagagttaaagtacctgtcgtagtctctcagcacatcataaagattaaagttgagtggctcggaaatgtcaaattcgtccagcagagtaactaattcggcttctaatttcgaagctatttgtgtttggttaggaatttccgctgaaaaatcaggaattttggagatagagattccattgtatgctgagcgtgagttatttgacaaatattcgattaattttaaaaattcttttgccaatgattcagagctatcatacattatgtctctttctgatcttattactcttttctggttcttcgaatacgccttcctctaaaggagtacgacacatcagatcgagttgtgttggataactataaaagtaggtcgattattattaaaatgtgtatatttcattgcgatttaattaataaagtaaaataaatgtgtaagtgagaattgttaccacattttcctcttaaaacttattttttcactaaatttatcaaacttttcagtatttttaatcttttttatttttttatacaaaatttattctaacttataccatacacattagtataaaaatgaggaaatacatacggaatacacagtagagattattgagataaatttaattttttataaatgaaagagaatgtgtttttgataatatctggctcttgttgttcttctattcctagttcatcgtatgcgtttagagattcatcggatttatttagtgaaagcttatcatagttgattagggactgattgttcctaaaactgcttcctatagagttttggttcattgagtccgtcctcttgaacccatttatccgtctttgtactagttttttggatccatggctgtgaaaattctcagctctgttccctgaattgagattgactaatcctctttttaatgcgttaattgtgttcatctgccttatacttgccagctccggacttatctttattctctcattctttacatcctcgtttacatagtgttgtacagtaggttctagattagattgcgggttaatgttgattgaatgggaattgagtgtgttggaatgaaaattattgcttagtgtattagtagagccttcaccggaggcagtggagcagttgggagaatggtcacaatcggtggattctgattcataagacagtgggctttgtaaatcatcaaacttttgataattctttaccaagtcgacgagtttgtttttggcatcggtgggacttgggttatttaaaatttctagttttgaaaccaatttcaaattctcagctgatgcctgttcatacagctccatcaagtattcgtttttcctacttaactcttccagtcttgtttccaaatcaattatatccagtttggccttattgtaatcgcttgaaaaatcctcttgattgggattcttcgtagcaattaacttcagcttctcatttaactcattcaattctgacgttagactaacgttttcacatttaaccttatcaaactcagcttctagcaactgattctccctctttaacagctccacattatgagttaactccatgttactattaattaattcatcattagtgatcttaagttcattattattaataatcaattcattattagtgttaagcaattctccattagtattcctaagttcactgttactattggttagggatagattatcatttcttaataaagaagtttcatgcttcatttcactttctagtttcgaattatattcctttaacctaagattatcaccttctagattagaatttgcctcttttagtcctgttatttcaatctttgattgacttaactcatctgttaactggcacacttgatttgttaatttattcaactcattcgttaatttagttatttcatccttttgaacactcagctgtgaatccttatcaacttcatccatcatattaactgtattaacagaggtactattagtggtagtagtatgtgtggtgttattttgtagttggtttaatgctgcttcgaggttgaagattttatctttgagagcttcatttgatttcaagagtccttcggacttagcgatataaacttgcaactctctggtggcttttccataatctgaactatcaaatttagcactaagttcctctaattgttgtttaagcgtttcaatctctttgtccttattaatgataaaatcatttaactgttgattttgctgagtaattgactccatttcagagtttaaaagtgagtttttctcgacgaaactatttttttcctttgtcaacttctcattcaattcttcgtttaactccaagagtcttctgatctcttcctttgaagttgttaactcacacttggcttcggagtagtaggtataaaaccgaggaagacagccctccaaatctgataataacttgcgatatttatactcataatcccagctatcgtctgcttcacacaattccatcgctctatccttcgcatttttaacattatccttagcactgttaacattcatactattaacattactcttagcgttattcgtgctattattggaagtataatttgtgttaactgaggtatcaacatttgaccaggtgctttcaaaatgtttggaggtaaaaataacgctatcagagagagggttgctctcatcagaaataggagtattggatactgtttcagaagtggtgttgttagtatcagaagcgtttcctgagctaatatggtcgtaatcagttgaaaaagtggtggatggttcactttcggagaccaaatacacatcgtaggagtatttcttaacaaggaacccaaaaagcatggttgatatgtctgagactgataccagttcagaatcgaacattttcacagaattttcaaacaccttcgaccagaaatcatgcaaattactattcttttgggcctttctaatggactcgagcaactcagttttgctgaatgaggactctgtcttcagtatctcatccctgaaaaaacgcaaggaaatcacatactcatcatccacaaaacagcatttatataaaatttcaggcatagcaagtgaaacagaggggtgtttaccgctcaacacatcttcaattcctaaattacattttatacacatcagggtaactaatcataaataaggttaaacaagttgtaaatataagtaaaataatggcaaatatggagggactaaatatgaatgacggcaacctttccagaaaataatgaaagtcacagattctgacgaaacgggcgcggaaccaaacacatttctgaaattttcaaatttatgcaaattcccaaagattctgttattattatacaaaatctgctgtaaattataaccgtttgctcttccaatcggccctcttaagtccttgcccagagcgtcacgatatatcgagattaaaagcttcatcgcctacaatctaaacaagattttcaggtataagcgggaattgaactacacattatatttttattgtttaatggtaatttatggcagaaacaagtatgtggaagatcctggaaacttaaattacacaaaaacaaaaagaatatattaatattattttgaaataaattatataatataatttaatttaaaaatatagaaatggatatatctatatataaaagtaatgtgtaaattgggatttttcatttttgtaaaaaatttaaaattaatgttaaaataacgaaaaatcaacattattattcgttttattattttatttgcagatcattggttatgattaatattaacagaaggtgtgttagagagttaatacaaagtgtagagaatggaaaatagtaataaaaataatagctagaataaagaaaaataaataaaataaatggaaagtattaaattatggaagattctgaaaattttggtttaaacaattctatatattgttttgttaccctataatgaatataatggaagatggatataatatatatgtctaatgttggtgtaaattttggaagatttataagaattagaagcttaagtgacccgagtatccaattattacattttaagagaactcttgggtttttgagggctgctaaatctggaggcgcacatatgttagttttaggaaccaaacaccaaaaaagtttaaattaccagcagttattaagccaaaaattcgataaccctaccaaggtaactccagaaattatcacaaacgcccctctaaactacgacgtgatactttgttttgaccctatccgctacgctaaacttttgtataacatcaacttaccctgtgttgctatttcaaaggttgaggatttctatcatcacagggacatccctgacgcctttgactaccttttgccattaactgaagattttttggatatttctagtattcattccgattagtttaacacctttatcacttctgtatactttgttatagtaactcaggccgttaatcattataacaaatatcgaagaactcggttgtatttatctttgtgttaattagagtaatgagttcatcagttgaatttgagcttcagaatcgtaaagactcctccgatcctgtgtctgagaacatctttttagctggcaaagcttgggaatttttaacccataaaatatttgaaaatgaggctggaagtgcctttcttattgtagcaggtaccgtagccatcgctgctctttgcggtcgtgaaagacgtgctgccacacttgctagatcactacaactaggtcctgcgactagcctcagggtctttgggcatcctaggtatcacaaccatgtacccaaaaatcctcttctaaaatattaatattttataacatatatatcatataatattaagttaaactttcaacttcttgatgctttgttgtaataatcatataagtctccatatttctttgtatcttatgaatttaaatactcctttcaccaaaagccctcaagcgcctgtgaatccatttacacaacagtcaccaaacactatcacaagtacttaaatttgaaatcaaactctaaaaataactaggaataaactcttaatatactaatatactatatatggtgtatattagtagaataattacttgagatttaaaaccctttggacagtggcccagcacctttgttcatcattcagtatttcttggcccatcctggtgtgtttactggggacgtactcttgtgacatgttcctaaaaaacgctttggccactgatactgcggtttccgtggttagaaacaagtttgagggatccatgtttttgagtatccacggaggtagtttggatttcttgtcaatcctcgtataccgggcatcagcaaacaccatcaatccaaaatctgccttatttcttataactctaccgacacactgagcagactgccttattgcgtcaaatgttataaattcattctccaatatgccgtagttacactggaaaatattataacataaatattattatgaaaaaataaatatttactaaaaatatagttaataaaaataatatataaataattaggataaaaatatattcggaatactctcatgaagtcgaggcgcgccttgagaactttggaaagagtgtattggaatgggatcccgacgagaattacacagcgtccataatggctgttaaaatcaatcccttcagctactttgcctctgcaaattgaaaggaataaggcgccgcgtcccacgtcacaagctctccggtagttataaagtgcgagtgtcgtcgtgacagagtcttttgtttccatgaagaccagcttatgctccattatagaggcaagtatgcccgtttcataccagtgagaaagaatcagctccatatatgcgtaacttgggaaaaagcatacaacgccatccggaatgtgcttacaaaggtcaattaccagggaaccatagttacgtagaactgtaatgtcggtcctgagatcgaacttggttgacatgtggacctggttagcccccttcgaaacgataatgggacacaggcagtctctatccagtgacattgggagcgattgcatcagaactggggtgaaatttagtattttggggtaaaattcaagcggtgagatagtgccggaggttaaaataacagactggaagttatcaattacggacttcatggcaattgaggcgtcaagacaagagaattgtaacaagggatcatatgaagttgctttagggaatggatcaactattactatgaatccattgtaataagtgccaactagtgtacaaaagtcaacaactagatgcaacgaagttaaatcgccaacagctgtcatcttcagtgtgtttaacaatgacttcattctattataagtgtgttccataacgtccgaattaatcccagtttcatgctcaaacctataaggaatatacacaataactatcactaaactcttaatataaataaaattacttaaataataacttaatagtgtgtaaattatgtaaatgtttaaatttacattgggattcaaacctgtatagaaacatgagtggtccttcggatttggcttccttaactttgatatactttttcaagtatccaataacgaccttgaggaatgaaatgaaatgttcagctttacggatggagcctgggattgcacggtcaacaatatcttgtctgagtactgggttcatgtaaccttcaatgtcaatagagccaaagtctgtggtctctaccagtcgcctgtactcctctagtagtagttcttgatctcgtagtctaagttccctaacgttatcttcgaggcgtgagaggtctgagtaggcgttatcgagagtctcagtactgagttctacgcttagagcctcaatacaaacattgtctatgttatgagcctcatcaaagacaaccacgatgggtaacttaggcttactatccttgtcttctcgcttttcctttaaataattctcagtgcacaggtgataaaacactgcatcagacactttcgggtctatcaggtactgatagttcaatacaacaatgttagcgttgtcaattgcacgtcgggctgcgaaatacggacaaatcggtgaagcacggccagtcctagagtccttatacttcaagcaatattccttcaaaccctccaaagtatatacgcctacaccatttactcatactaacttacaactatataactaaatttaatcttagaacttaaatattaaaatattatataaatgaggatgtaaagtggttggagggactaaatgagagattagatagagtgaagggttagatagaatgagttgtagcaggatgggtctgtatgaagctcaatacctgaagggataaatgttgggttccagatacgttccatggtttcataatatccgcatagtcccatagagttaaactcctcaatatcaggtatttcttgaactgcggaggcgcttggtcttcttctaataggccttgacccctcgtagtccaatgtatattcattcctcttcttatcctccaaatcctcaaactgcattctacgccatacggatgttaaatcacaacctatcaaatactattatcatcaatatatatggtataatggttctaaaaatctagcaatactatgcatcgttagtaactacttaatagtagtatataactggtgtaatcaagtgtaatgtacatttttcatctatttttgtgcgatcggcgtgtgaagaaacctcaggatggatacacagattacgtcgtgaacaaagccctactgccaaaaaataatctaaaacaacttttaaggtcgaaaattttaccattttttggtccatctacatccaattccatcttaaccttcacctttttttcttctttcacttccttaaccgagtttatatttttaactgaatttatatctttggagtttggattctcatttgtattggttttgtaagaggaagatccaccataagaggaggagtgatgtatatttaactgtgaattgcgatatgaaatgacttcgctgagctcaagaagtgccttttccatctcatggattgtacgggtacaatacacgagcttacccaattccggccttgcaagttgataactcgatacaaaactaaataatgccaccgttttacctattataacattacactcatatatataagactacatactattattattacactattgcagaaatatgtgttataaacttggttaactaattagaataaggttaaataaggtaaatacgataataattagttagattagatggaaataagagtaaaaatgtgtaaaagtgggatagatgtgtaataaaaggaaaggtgaatgtgaagaaaacctgttccggttggcatttcaagtacagcgtggcccttggaatctagagcagttttgaggcttttcatatatgcgatttgctccgggtaaattttcgggtaaggaaaaaaaacctcaattccgtcaatccagaaccgaaccatgattctacagagaatttggaaatattttacaggaaaaaatcatcatttatttattttacaaaaaggattttaaattatcaacatttttaatattttacattattttcattttattcctacactcttcatcaccgtcccattacactataaacagaatagatacttgatatatatttttattcaacacattcaagcaatagtatactttaatttatccgtaaatcgtaataaattaagataaaatgtgttcaatctcgtgaatagttagatccataaatagaaggaaacatggatgtaaaaaattgatttgaaaaattgcgatttaatcttcgtcggaggtgtcatctagtgaagtgagaagtagagaggatgagggaaccagattggcattttcgagtgttacatttctatcagagagtgtggttgatgggtaaggaatagagaggttgaagttataggggattttatagtttttattttcaaggaattgggaggcttcaacccattcgtagattttttctaccttgtcgtttttggcgaattcgccctcaattctattcccatttggtaatctgactcgtatcttaacttccttacgctcaaatttgtcaaacacatttgtatacacttttgcaagttcttttctgtgctctaaaattttttccctttcctctttcttctgccttttgattagctcctgggtccttctccgctgcgcctcgtctctcctctttatatctcgttctttgaacttcactgaatcgatttcaactgcccgtctgaattcttcatcctgttctctgataacttctcgagaactctcggctctttctggcggtggctggtactccactgagcccagaagcatcgaaacaagtgcatcatgttccacactcccctcaagtctgtttaccactgtacaccgattcaaaccttggaatgaaagtactgaaagatggggtactgtcatacagtttaccaaatccatcatcttcctcatgctcgcacccttataatattccatataaaatatataattcgtatcctgaatatttttcaatacccttattattatatatagtattaattacacggtatagtacaatagtattataggaatagttacgggtatataactggagtaaatagagtaaggagatacaatgacttcgataatgagttggttggtgaaaagattacggcaaacgtgatcattaaattctgaatgaatatatagtacaatcatcttcccggaatgtaatgaaactcttctagcctatatatgattatactcggtatataataatataataactatatccgatataataactatatattattataagttgaatataagtaatagtagtgagtaacttcttcaaaacttccgaggaatattttagggtgtattgagccatatttcgactcgtattcttcaattaagtgagttggtgtgagggttaggagggacgacacccttctgaacattgccaaaagggcttcataaatcggcaccagcacaaagtttatgaaattcgaaaatatatcatacaaaaacatctcaattcatcacattacactaattcatcacttttcctaactttgacactaacccatcaatttgacaccaaatcataagtttaacattaaatcataagtttaatactaattcatcaagaagaaggtaactccatgtggaaacgacatgaatcgaaatgactggaaaactctgaaaaaatggtcaaaaataataaattattgcaaaatgattaaaaataagaaagaattataaaaaaatttgaaaaataaagctcaatttaaaagtggtaaaaattattcagaagcgaaaaattggaagtgtcataaaaaataagaaaggattaaaaggtgttaacaaagggttaaaggggagaaattgataataaaaagggatgggaaaggtgtaatttaagtatggatagggagttaaaaggtaaaaattagcgataagtggttaaatttaatgagtaacgaaataaattgtagtgtaggaatcttcgagaactttttttaaaattttaattacttttatcaaattttaaaattttgttattttaatttttagaaatgggtttttagtgtgtaatattttgttatttgggttttaacacattttcacaggccttatttctgaattttgttttagagtttaaacttttccaaaacgctggattcctcacttaataaagtgtgttttaattttaatttttaacatttgttactattcgttcatgactttcccttttcagttttgggaatggttcactactttctgtcgtcacctgcctaggaattttcacttcattttttctcctacccactttaattcattaaattaactatttttttaattagttttactctccatctattcacgtgtccagttagcgcccttgttgtttcgtgtgtatttctaaatgtgtagaaccatcacaaattttaatattaagtcttttggaaaattatattataaaattataatataataattataaattataatactatattatatgacgataatcacagattatctgggaattctgtgaaatagtagccagtaacccaaaaacgctctaaactatgaaaataaagtgaaagagtaaagatcaagacgaaaatccaaatggacgaagaagaattttatgaaaatctaaagaattttcatggtcctgagaagtatttggagttgtctcaaactaacctatttggagccaagcttgacttgttccgtttctacaaatgtattagacgttttggaaacttaactgagtctatgatcatcacacattggagggagatctgttccgagatcggtgttttaaacccatctgactccgtaccacccgacgaggctcaaaaggcctctcgttacttttgtgatctttttttcaacttcaattatccaaactactctgccactcatgtaaccaaatatgatgaagccaccaattcatcctcttcatctgaatatatcaatacaatttctaataggtaactcttatgccatataccttttattattatattacgctttagtatattatatacagtgttggtatggtgtgtgtaggtatatagcatatgtacagtagtatgagtattagcatagaaatcataatattttagtgatgatgagaatggaatatcatataaaaatgtcgtttggatggccaatcattttctaaaccaacaaaaaagcagcatccatcacactactggcactcctaatactcacagtactgacactaataccactgcccatactactccaaacaccaagaatactgacactaatagtactccaaacacccataacactgttaacacattccataataccaccaacacacttgatagtaataatagtgttaacagcgttgacattaaccctgtaaacagcgtaagtgatgaacaatggaaactgtcaatatatgaaaataatgctccattaacatatgaatctcaaactaaagtgggtaatgagtatagtatagtggaggaatcaaacgacagtgagagtgaggaagatgaggatttggtgtatgacataatatatgaattatcaaagtatataattggtagaatagaattagagtatagtcttaagatactcttgaaaactctaataataagtaatttgccagatattcccaacctcattagtactctgtcactcatcaacttccagtacactagcgaactcactaaatcacaacaaactgagtcaaacataaaaattatcatcacagtaaataatatactaatattgatagtgagaaattcgttcattaactacgaagattcgtcaacaggtgatactattgataacggaatcaatgataaattaacactatatgaccaggccacagtttgtctaaactcgttgcaacactctactattactctttttaagctattcaccagtaataagaatcgggttaatgttttggatatgtattccgaaagtgatattttgagattgtcagatacattgaacagtatattacttttgataaaatatttaataatcatctcaacatctcaatggcaatttgatctattacacctcttcattaatcaagtcttatcatctctcatcaataatattaatagtagtggtgcgggtagtgcagtgattggcacatgtaacacagttggtaatactagtgatggtgcaacggaagtggtaaatgagcatgtattggaaagtctacaagtgtttatgaaagggtgcaatgagttgtgtaagaagttgaagagtaaattttccctaaagacaatagtggatttgtacaccttgtcagttcggatcctcaagtctgaggctctttctaactcactgaagaaggaaatttttgaacttttactcacaattcacacttactttcacttctcaaatcatcacatgcataataacatacaatttgtcctacaatgtttcatacacaacctcgtcaaccccacccataccactgttaacactggcagtgcagttaacagtagtaacagtgctaacactagtaattgtgttaatagtagtaatggtgttaagagtgataatcgagtgtctggggacaactatgattccatttttaagagaagaaaaaggagtagagatgagaatatgaaatgtgttttcaataacccagataataccaataccaccactaatgctagcaataacacgagtaatcatactaacactggcgccactaatatcagtacaaaccgtgatggaatggataacaaagctgatgttaacgtcaatatggaatgctcagtaaaaagtgaggaaaatgatggaaatactcctgaaggcgatgactctgtagtgggtactattggaaataattcgtctgatgcgaatggaaaaaagtcggttgatgtgggtgagggtaattgtgtggagaataatgaaggtgttcgggaaaatgaacaacttacattagaagattcaatttcatttttacaattttattataaaactgtttttggcatattcgccaatcaatctgcgacattaccaatactagataatactaacgataatgataataataaggctaataataccaataaggataaagataaaatgaatgatgtggatgtggatgagaatgaaatgaatgagataatatgtaaatgtatagagaagttgttggaatattcattttgttccgaaatgctggagaagaattacgaaaaattgctggaatgcgcttttaaagagcattcaaagtcactgtggagcttaattcacaagttattgtccaaatgtagtcactttacactcaactgcagcaataccaactatcacattacacattttaaacaaattctctaatctcttaaaatctataccctatttcccaaatacctaataataatactatagtgtatattatctaattaactaattaactcaaaatacatctgaaattgtattaatggcaaatgatattgtaatgtagtaatagaatgaacagattaaagatcgggattattccatggtgaagtgggtgagatttcgaaattgtcaatagagacgagtgagccatagtgccagattccatgtacaatatgtccacagccaagcgtaagagtcccataaccttccttctttccattgacaaacccgccccgataagttgaagcatcctgcttacaaaaaaatgtgccagttccatgcctcttatccattacccaatcacctaatcatatttttaacactattatcatattatgtttagttgtgttgttattgttggtcttagtatgcgtagtattaaatatattattatcggtgtagaatgaaatagatatataggtagtatgacaaaccttcatagcgattaccgttggaatattcgtaaattccattgccatttgcatggtcatcttcccaattacctattaaaaatattaaccagttattaatagatagggtttaaagtaatagtatataattattttaaaaggtaatacaaagctccacggagggcataaataactgagtaactagtctctgagggagtagtaggcacggtaatgtaatacctctaaagcgatctccattaacgtatataatttcaccagggccgtgttttctaccattaacccattcaccattatatttatcattggtggcataaaataatataccggaaccatggcacttgtcattctgccaaaacccctcatatttctcaccattggcataactcaatattccaaatctatagacatatttagaattatccacaattatacataaataatatagaactggcttaagcaagtgttaatagtggtaaaaaatacccctgtttagtgtcttcaacccattcaccctcatatttgttaccatcagcataaacatatttcccagtgccgtgcatctttccattataccaatcacctacgcattttacatcccagttaaattattaaattattaactatataataactaagtatactaatgtaagatcgtaataataggcaactttttaaatagcataataactgtaagactaggtaagttgtgttgggaatcaattatgtgtaaaacaataccatcgtaataacttccatcggcatatttgtacattccttttccattcataatattgtcgacccaatctccttcatacttttcgcaagggtttccaagtttgtcaacgtaagttatagttccctttccatgacgtttgtcttgcctccactggccgacgtaaacgtcaccttcactgtactggtaagtaccgtggccatgcattgcaccctctaaccagtcgccctcatatacatcaccatttgcatacttcaaggttccatatccatttatacgtccattctcccagttacctatgatcattataagtttattcggctatactatatactgggatataaaattagttacaataaatagtaaatataaaaactgattatggctaaaataattgtaagactaagtatccaagttgttataggtaagaattggtcggttgtaactgtgtgataccttcataatagtttccggatgagaaataagcaatcccgtgaccatttattttatcattgagccattcgccttcataaactgagccgtctgcgtagtaaaatttaccgcgtccttcacgcttcccgagaacaaagtcaccttcataacgttcaaaatcgttgtagtaaaacgttccagaaccgtgaaataacccgtcaaaaacctgtccagcgtaagtgttcttagccgaagatgtactctgatcactcacaaaggtgatatcactcgctttagattttaccgatgccatactctaacactctttttacacacttttaaatataccgtacccttaaaacagtcaattagtggttagttacactaaatcagtagttggttagggtttaatttatcctttataattgttattttggatgtatttatatctaatttacatataaatagatgatgttttcttaaatttgtatttaattttggggtaattaaacacttggagatattagaaaatatcggatatttattaaaaattaaatattatgtaaaaaactaaagtaaaaaggatcaaggggaaagaatctaagaattgaaattggtaaaaaattaaagtttacacatgtgtacaaaatttccaaattcgtagaaaatttatggaatctgaaatgaacttctttttagggctttaagattttgtttaaattttaaaaaatattaaaaaatcattaaataaaagaattataaattgagttgggcccattgactaaatttcatgtttttcataatttttacattttttacataggtatttatgtaatagtataatttttgaataagtattaatgaaattgagtgagagtgagaggatatttataaaatctattttcaattccttgcaagtcaatcgcaaattgttttgtaattacttaaaaaactactcaaatcaaaattttaatttcaagtatcttattttatctatttataaatactattaattattgctaaactagctttataatgtgtgttaattattgtatagagatttggaatctgaaaatgaggtaaaaactcatttatgattaaattaatatttaatagaaaatgataagtttaatggatgaaattcttatggaatcggtaaaatttgccattttgaatttttttaggtaaatgacttggttaagataaagccttttctaaatagacttgatgtgtattcaactgacgataaaattacactcaaggacatgtacaacaattggaaaaatgacattgttctaaggataattatacttaaacatttggtaactcattaaattatttattaagataaaatgtttgtttacttaaaatattcatttaataaaatattgatttttttagaaacggttcgattcagttgatttacaacgagccctcttcatcactttagactctccgtacattaatatttaatttaatccccctcaaaaaaatcaacttttatactacaattagtgtgaattattgctgggtgatgttgctgagtaattgtgtagtgttaatcctggttcttgattttatatctttaccaggtagcccagttaattttttattcttcagctcctctcttctcttcttattagtttctctcatctttttatttaacatttccacttcttgtgcactcattttaccgcttttaaccaacctcttcatcttactcttgaattttcgtttctttctattacgatttgtactcacacttatcaaattgctatcaacctttttatttgtgttggtgttgttttcggatattataacgttgattggagtttcaacagatatggtagagacattgttagtggtaattttaggtatcttaggtacaaaggagcaatttgacagtgagtccagtttatacatcaacttactgaacatctgtgttaatagttgtttctgagcgtctaatttactattatttgaggagaacagttgtttatatttgtcttcatatatttcaccaagtcctcttttatcctttgaaaagtctaactcctcagcaggatcaggtttagactcttctatgggatgaaaatcacgtttatactctatattatcaaatattccactctttatcctctccattattattatttccactccaacgttattatcagtagtggcagtactgttatcggcatcatcagtggtctcagtagtattttgtaacgtggagttgtaatagggtaattgtaaatctagtgatagtaatgagtttctaggccgagaataaccccaagcctcacccatcattgaccaatccttctccttcaccaattcctcctctatcttatctatactgtttttttctctattcactccattaactggatttttatcatttagtgaatttttatcaacatttggtgaattatcatcatcatataaagtagttaaatcgatgtcatctctatatacatcatcttcatcatcagtaccctcagtatcaccatccatatcatcagcattggtattgatattggaattgatattatttgtggatgggttatcgaaaaaatctgagtacatcatatcacatgctggtgttgagtcgtcagattcttcacctagtgaatcaaagtagtcgaattcctcatcctcaatataatcctcatctgcgaacctctccatatcctcaaacttaaagaatccatcctcgacattattttcactaccttccaaatgattcacgtcattgttatccaaagtattatccaaacttttggaatcatcatcactatctacagtatcaagaggtgagataggagtgttatccactgtatcattggcgttgtcaatgttattggtattattggagtcattcgagtgtttacaaacggttaaggtattattgagtaaaattttgtcaattttatcactaaaatatgttacatttaaatcaagattcccagcaataaattgccaaagttgctgtaaatctaaactttgggctgagttgaccagtttagtggcatgagaatttgagtagccctgagaacgcctaactgccgaggatttacgtgatcttttcttggcagtctcctcagccaagtactttttaaacaatttcaaacgaagtaagtgaaataaatttaaatttaaattttttctgagaaattcatttgaaactgataaatcagtaaataacagccaaggagactcagttaaattattatcactcaaatcaaccataacaatttacattaataacaaaaaaataataataaagaaataataaactgatttggtggtgaaatattggaagaagtataaaattggaatcctgcaaatttacactattttatcaagtttcggaatgaattataaaatttttacactaacttttactactacttttatgggactaatttaagtagttagtgtaaaagcaggtgtaaatggagaggaagtgacactttatcatgtttttatgcttaatactgttaacactttgtttgaaatttgttttcttcacagattcgtttattttgtacaataaattattatttaattcggctccaacgagatttgggccttccttcaaacacacaaacttaactttacaactttataacacaccaggtaattcaaattaaaccttctaactctttttagtcaaaaaatcactaaacaaccttcataacacaactttacataattctactgctactgttaacactgttgaaaacccggttatcacgagcacaccgttaatcaacaaagttgatactaataataatagtctattggatgattcattagaattaaacaagactgagggattatatacagattcagagcagtataaattattatcaaagtattttagtgttgaggagagtgtgaccgagaaggaatacttgcctttaaaggatcgttttattactaaagttgagggtcctgaggtttactttcctgttgagtatactttggagtgtatttctgtagttcctgagctttttcaaagtaattttctactgaggggtgaggatcattggtcagaactaatccaaatccgctcgctttttaggcgtaaaactgagattttgaatcaaatttctaagcttacagccgagaaatcggattcctcaaagacatttttcatcaaaaactgtgtcaactcacttctcagaagtgtaattattggggccagaaataaaattagagagttgaaaagtgagttaaacactgtggaacaggaactgacggccttaagattaaagcttccaaaccttctgcatccagaagttacagataataacacagttttaaaacctgcaaaatacagtaacaacgctgtgttaaagagtaaattagaccacgttgatgtaattaacaggttatgtccaaggtatatagaacgtgcagtaagtattagcggtaaggggttttcatcatattgtacacctttagcaacactttccagagcattagttaattattttctggatactctgaccaggttgtttgattatactgaggtggttgtaccattaattgtgacgaaatcaactttggaattaactggtcatttgccctattttgaggataacttgtataaacttgatgatagtaatgtttttaatggtgaaactggttatttaataccgacttcagaggtttcattattaggtttattcaagggcggtaaatttaaggctaacagtttgcccaaatttttcacagcgtatagtgaatgttttaggaaagaaatacaagattacggagctaacgccagaggtttaataaggcagcatcagttcggaaaagttgaactactttgtttttgtccaccagattcctcagaatacgctcactcactgatgctcagtcacattgagtttctgctaaatcagttagaacttccatatcaacaggtacttctaagtgctaaggaaactggccatacttgttccaaaactatcgactgcgaagtccctctaccctcaaaaaacttctttctcgaactctcgagctgctcaaacactaaagactttcaaaccaacccactcaacattaccactgatactcttaacagtatgcgacacaattatttatatagtcaaaccattgtattagttatataacaacaacactgagttatataatgtgtggtaggagttcatagtgtaaatggatcaggattagcaattggaagaacaataacggcattgttggagtataataccataaaaagagaaaacgggttaatacaagtcaagataccaaaaccgttacaacaatatcttaataacagtacattaatattggaaaatccagttgaaactatttgagatgtggaaaattagaagcttaacccgtaactttgtcaggtattactctaccagtaataagttattactggataaggctgattctgaggttaaaaatgagttggaaaagagattgctcgaagttttaccacaaaattggtacaaagataaagttattaaaattcaaaaaatcatttcaaattcttttttaattttactcttcactggggggttcctagcgaatttttttgatggtatcactgttacgattcttgctcacgcgcacagatcttagttattcgccacttatttatcctattaggcggacttaattgataattaattagttatatagtcttaagttaaattaggtactagtatagcaatagttaaccctagccgagtttaaatttttattagataggaataaggaattatcaagaatgataataacttcggaaatacacttaatgagttcatatttagcatttactgtatcatactctggctattcttatacagttattagtgtagttatagtaaactctgctgtaaattggatagtctggaatacaatcgggattacagcattatttaagctgtggaattgttcaagtaagctatataataatattaaaatgtgattagagaaggtttaattggatacctcattatagacaaggtgttgcaatttccggtgtattagcttcaacttttgcttcaagtattcctttacggtgcttgccgcagcgtcaataatctaaacttacttagttctttggttatttatactattaaccatatattaatagtgttatcaagagtttaaattatatacctatttgaataattggtataggcaatagtgacgtatcctccaaaagagtattaagtatactgttgatgtcgtatttgggaattttgggaaatgaatacctctttgcgaaactgaaattatcacctcaatggttctttttactccttaactttatgttaaatttgtataatatacataatttttatttaggatgaagttgcattccaagaaaaaggcaatttccatcacaatgggtattattctactgatttccctcttttaactaacctaatatgattttaggcatattattattactgatgtgtgaatcacaagttatcaatgggaaaacaccagaactataaaattttcaatatttttactacattttaatcatattattattatattaatattatattaacagattattaatttattatttaatatttatattttattaccatcaaatgttggtttattgagtgttaatttgttggttgcattgtgttatggattcggctgaagtggattcttcgaattggaatataatatatccaacttatcttgataaagattgtactagcagtcagggcaggaagattaatttatctgtcgctgtttctaaaccaactattgaagaaattaaaatcgtttgcgaaaaactcaatattccacacgttgtcgaagaggtatgccgctatagagcttcaaactctactatttaatccattagttactctctgtgggatttgttcttatttttactcaatttagcccctatgtgatacctatttatacactactcttataatacaactcttttgataaatttcttatcctgaattaacaaattttgagcgtatttatataacactaatggtaatagtattgaataatggattagaagaagagatatccaaggaattggatggtcccaggtcgtgttcgagtatgtttaagagattctgaaactaatgaaaaaacaagaacaagtaattttaaaacaatttacaaattttcagaaaaacaagtaatgtgtgaaatcgcaaccttaatatcgcagttgaaaactagacaacagcctaaacaaacagcacagtcaactccaacctcaaaaaagaagcctaacaaaaaacgaagataataacaatctaatatatttaatatagtatatagttgatgtataagaagttatgagattagagagaatcagccttttgttcatgtagacaagagatccaagaatagtgtgatctgcatttattttcagttttcatcaattggtcgactttgcaaccaaatgtgccctttgagcatttgtcgattttgttaaagttttcgtcaccctcagaaaagtccagtgaccatcctatataaattatatcaactgatagtttaataagattaggtatataacagttccccaaagggataaataagtgatagtaaggacagtaacgaacctgcaataagttttgagttgattggacaagagttatcatcatatgcattatctttagtttttttggaacaatgacgactactcgtactcacaacgtgattcgatatttcctataacatatatttactccaccataaataatatatactagtaacataggactaataatatgtatcactaatgttaactataaagctaagggcccctgaaaggtataactacgatcccggggatatgagtaacgtaaataatgtaataccgaaagttgtggtgctccattctctacacatgcgatccaaacagcattcgtagctgttttgtcagtcgactcatgagtacacgactgagttcctgacctgcaggcatacgaatccgtattcaatgctacgttccctttgggtaccgataatgcaaatccatatgctattgaataaccaactggacatgttgcagttgcctataacagacatattaacacattatataatattaaaattgagtaactaaacatgatagaggtttgatatatttaacgatactaatattaatagagtaactaagtataataatggtaatgttaagatactggttcgtctatttctgaagaagtttgttgattgagtaggggaatggtatcttcgccacagaccgcccaaattcttgattcagacattggattatcacttgaaactatacatttttcctctccaactggacattgtgttatatgaagtgtgaactcgtttttaccaactatgttcttcttctttagaattgacaatgagaatcccattattatcactgtcttattaggacatattgcactcccactcttgtttccactatatactatttgatgtcccttctcaatctaaacaacattataatattaatagtacaaaattagttaatttaagataaataagagaataaataaactgtgtaattaactgagtgcccctgcaggggttagcaagctacgtaatgcagtaccacagaagcgattccaaattcctttccgaattttttataaatctcatcaggagaaacaccataggtttcagaataaaactttaaagcttcatcgaataattccctttttttacccaaaagtgacttgatcgattccaacttaatcttaatgggcataggcctcttatataattctttagcccaattatttaggctattagcattcttactatcaactaatccgtctccaccaattactaacacttgtttatcatatttgagattgtttgattgtgaaagtgaggccttttcagatgttgatgcgaatccgccttgaagtgagtctaccatgaccggtgaaattgaagcctttacagccgcgtcaacattgattccattttgttgcatgtgcaaaacatcagatttgtcgatttgcacttggtgtgtaatttttcctcccaagtgtacaatcgtagtaaagtgggtaccaaacatctttataaattgcatccaaggcaaaacagtctcggcacatattgaatcatcttcatttgacttaaaagtctcaatagtacaactatgagagtcaaacttatctgggagagcttcaactgctttcttgaactcatcagtagtgtccagagaatgataatccacaattcctccaacatacctcagacaatatgtctttgttatgtatgtacgcactttgttagttgcagttgattttacaaagttcttgtaaccggtagaagcagaaaatgaaaagaaatatggaattccataagatgcctgagcatccactgacaactccttcttaaaatcatccacagtattcacatgatcaatctacatcaataattattcaaatatatataataataaatagaactattagtagtataaatattagtattaatagtattagcttatctgcataataaatagtgttattaccgtttcagattgtctgcatgaatattcgggtctgatccacgagccacgaggttctttcaagttagcaccatctttattaagatattcgtcttcccaattgagtctgataactgggtttctgtaaccttggtccatcatgacgacggggtctccaagtggatttccaaagatgatatcatagcctgagcccaagtaacgcatcgaagctgcgagacctgagttgttccagtccatttgtggatctctaggatcaattcgggttgttactctttttgcagtttcaccttcaatttcatgtgtgtgttcagaattacgatttaaattcccttcaacatctggaatctcatcatcataatctccagtcagccccttcatcttctttaatggttccgtgtctacatttacgttaatagaacccatatcttcagtccacttgtctttaaacttctttctacgtaatggtttttgatctatagctgtaggatctggttcatcatgccttccattattattacctattccaggcctattcgggttattcggtctgtggttgttaggatgatcgggatggttaggatgtaggggtggtttttgttggttagggttatttgggttgtttgctttgcggttgttaggatgatcgggatggttaggatgtaggggtggtttttgttggttagggttatttgggttgtttgctttgcggtttttaggatgatcgggatggttaggatggagggggctatttctatggtgttccacaggactatagtcatcttcatcttcagtccgatgtttatggttatttttttggggctctacaggactatagtcatcctcatcgtcagtccgatgtttacggttattttttgggggctctataggactatagtcatcctcatcgtcatcgtcgttgcgacgcctatggtcctgttgcttttgtttatgtttatcttccaattttttagtcactgactcagaaaaatcttgagctttaggtccaggtccatcgcgtccaggtattttaatactttcatcctcctcatcatcatcagcggggaaaaggttataaatttctggattttctagttctgggtgagttttctggagatcatcctgagtgagttcttcttccgtcaaatgagatatatcatcatcagatacatctaaaccatatcatacacattaaatattatatactattattatactattggataattaatatgctataatggtataaaatggttataatgtgttacttgattgatggattgggtttttgtgtcgtcgaacaggagtagacataatagtatttaataatcctccacctctggtacctataacaatcattagtactgtatttacactagttatatttgttatcaagattttacactcgttaacactatctgaatgttggtaattagtatagttaattgtgttaaggtactttttctaggtcgtggaatggattcgtatgattgatcgcgatcactgagttgaatgtaagatctggtgtgaggtctgcctctgcgtgttttgcgtctgcgaatctcatcctcgtacccctcgtaatcgtcgtaatcgtcgtaatcttcgtaatcttcgtcgtcctctatcacataattgtcaaagtcctcgttaaattcatcttccttttcctcctcctcatcatattcctcatctatgtcctcatcatcatggtaatcatttttcttgtcatcataatgtttctcatagtgaataggacggcccaagatttttccatctattcaattattatactattatattaacaaatataattaaaaatcactaattatgagtaaactagaagtaaaataaagcacagttaagagtgaacaaggatgaataaggggtgaaatataccaatattgtaatctttggtattattggagaattcattgtgaacacggtccgattgacgatcagaataaatgggcaggttttgtttaaatctatttttagctaatttttggcgcattcgggccatttccttgtcatttttaccctttgatccgcgttccaaaaaactggcggaatctcgtcttccatctataaatcatcattatatcacaatttaaatgggttaatagtagacaaatgtgtaaatatgtaagggatgagtaaatagtgtaaaatgtgtattgggtgtaattagaaataattaagtatataataatactttgtttatggtgtggcagatatcgtttattgtataatttatgttttcttttatcatctagaaattctctgaggttctcttcggaatagtctccaagagaccttttaggtggttcctgagccttcttcttacgtgattcccaaagtattgcctcgcaaacttttagtaatacttttattaccaggatattaaaagctattgttagtttcatatttaaactcgcttttactctattattattttactatattacaaatcgatttatacgattgttaatttgaatgttgtaactttaaaatattttacaaaacagaaattgttaaagcttagtaaaatttaattaaatctagtgaatgtgttatcatattgagtttggtccggtatggtcaactctggtcgagtacgccaattatatgccatccaaataacgctggcatagtcaactgagccaaacgattaaatctggtaaattgttaaatcaaaaaaaataaaattaaatccggtaaataaagttaaagctgttaaaaagcttaagtaatgtgtaaacggaaaattgagtgattcagcagattgatgttattttgtgtgattcccgtgcaaatcttccatgcacaaggtgcataaagtaacgtttcctaggaaaatcacctataatggctaaaattaagctcttaagagcctaaaaggctctggaaggaatagaataaaaatacgtacagccatgtgtgtacgcatttattcttcttaagacaattcctttcactctgaccaagacacgaacattcaaaattaaaaatataaattttacttgatattttttttaaaattttacaaaattttgataataatattaatgttagtatcgtgtaacacaacactattaactatattaatcagctaattaaattaataattatatatagaataaaatattaattagtgtgaataaaaataaaattattaaaacggagaaaaaaataaggtgtaaagagtaattttaatgacctgtaaattcccacaaattacacattttctacacattttctccctaaatagtatttctattatttaataatgattttgttttatttacgatgcgtaaatttcttcggaagtttatcttttttacatccttttcaatttttttgtacctcctttcctactgttccaataccttctccaactcactcatctcgaatccttccttctatcacctctccactctagttgatagatttgaccaaagaatagaccaactcaatttttactctttaaaccactccttcaaatcctttcacaaatctgtaactatccagtttacttttaacaacaatattcttgctaattaactaattatttactgtttactcgttacatcaacgtactctacagagttatataccagttatactgagatatataatctctgttgtcacgagttaacaccaaaatacgcacttatatacactagtatactattagtatatagtcaatatagttatttttgatgatggaaaatggtgtaggaagtgattggactggattcaaatacatatttttattatttgttacggatagtgtttcggttgttttttctggtttttgtgcagctttatgtgttttatattctactcttcaggtatggtcaccttttcaaagatttgctcgacctcagctataaatcgctgaaacatgttaattggaagagcccaattaactttttcaggtcattttacttatttgttcactatgtcatttcactgtttttgtactataactcacttgtctcagtcagacttcgactaattttatactcttcactcgtgtttgttatatcaattatgtcttttaaagttggaatcggtactaaacactttgttaataccacgccaattatcataggtctaaccacatatttatccattttattgacattcacaaatacaatttgtcactatttaactctcttaaacactgttctcataccaatttgggccttaacaatttatctacgttcacattcaaacattaataatactgctggtaatagtatggatagtgttggtagcgtggatggttctgttgtcacgagtaaacacgtaaaaaggacacgacaaaaaaaacatgctaatactaataactttgtagaaagttctgaaagtctggaaaatatgaataataatccaaatacaagattattttacgagttaaacaactgtttggatttgtatttgataataatagtggtaagaatttgtaagtcgatcccgtttgtgggcaaattactgcagttgaatgtttatttatctcacattgctctctttttcacaatttcaattgtagttcactgcggtattatatatattactggaattaaagtaaatagcactcctttatctggagtcagaaatcttgtcttattcaccctaaattggctcatttttcacatttttgggattaataattacttttccaaagactcgagatcgactctaaacaccaccttaacctctgttactaccagagctaaacaaattttaaacataattttgggaaagtatttggaacctttaagccagcacaagacagttatggtgcttttaacagtgttgaggacgttgcctcagttgtgtttattattacttcctcctgtgttttccaggctttatttcgagtattcaacagttttagtgcctatttcaacctttttaatacacgaaaacaccttcaagcataagctctactgcatgggctttttcgtcctcgcagatgtgactcgcagtctgtttaatttcatgggttggatttcattcaaaacaactctaagaatattgttagtatatacaatgaatttcctcctactcaagctcaatcaatatgctattcaatgatacacatcatactataggcacacactgtaatatacacatgtatattgatatgcgtatttatgtatgtgtacatagtatgatttattgttaatatgatcttccccaaagtgtccatcttttagctggctttcctgtccaaaaacactttgtaccttcaggcatttctggctgatcaaatggaatgcataaacttttcattgccccagttctcccacctgccgactacaccattataactactagttactagagtaatgcaaatattagttaactacgcaagtattagtatgtaactgaagtaattatagtgatatacgttttctgagcgtttttgtgtttcttgttttatttcatcttcggttccaggctcttcacacctacacacgattacaaccctacgtgggtacaacaggttaagctgagtagttagtaattaaactaagtagttagtgaatattttataacatataacatatgtaaaacggaataaatggcgtaaactaaatagaatatgaataaaataagtagaactgttccccagggtggagttggaagaccctggagtggataactaagttccccaggggataggaggaatagcgtgaatgaaatggagtaccatggggccatgatcaatttatcgttgtttaaagcaaccataacctcttcaaaatcataagccttaacaatactttgttccatcttttctctggcacttgttagtaaggtattttgaatttggtccagcagttgttgtatagttgttgtcaaattctccaagggcacatcagcctttgcaaaattatccctacgaaccagtcgtacagtattattttcaacatcttttgcgccaacttcaagcctcagtggcacgcctctaagttcccagtgattaaacttaaagccaggtgtgtaaccacgtctatcgtctagttttactctaaaacctgactcagtcaacaatttgtatagttcgttgaccctagaaatcacttgatcagcagttttcgtcaagatcggaacaattactacctgggtcttagccacacgcggtggaaccaccagtcctctatcgtcaccatgaaccattatcattatcccaatactgcgagtagtgaaaccccagctcgtctgatgtactttcctcttctctccttcctcatcctcatatctacaaacattaaagtttatgataaactaatactatgataggtataatggataaataatatataagtggtataaatggtaagggtaagtcccctagaggggataaaaactgagttgtggatagcaaggacagtagtggatactttatatcaaacatatctgagaaagtagttcccaataaatgtgaagttgcagcctgaacacctctaccattagctggaacaaacgcctccaaacttgttgtcatcttactaccggcaaacttctcattctcactttttactccttttattactgggacacttaaatactcctcataaaatctatcatcattatcaataaggttattatatgattatctatcccctaggggtataatatgtaactactataataaataactagcccatcggcgggacacaattgagtggtaaaagatagtgtcgtacttggaatataaatcaagcatttcataaacagtatctagtgcttctttttcggtggaatgtgcagtatgtccttcttgccagaggaattctctacttctgatgaatggcgttggttgtttaaactcccagcgaactacagaattccactggttaagtttaagtggaaggtctcggtatgaccttatccattttgagaattctgggtacatgatggtctccgatgttggtcgaattgctattggatcagggaagtcaacatcaccattccttgtcacccatgcaacctcaggactaaacccttctaaatgtgttttttccgcctccagtctctcttttgttacgaacatcgggaaataacagttatccacccctctctatacaaataataatactaagataaagaataaatagactataaaactggggaattgggtaagtctaagtttccaaaggatataactagtttgtataaagcgagcagctaacctgtttaatttgtttattgaaccattcattgaaaatttcccagataaaataacttgcaggtaaaaatatataacaaccagaaatatcataatactcaatcatctcactacgaactataacctataacatttattactccccttgcagattaacatggtaaaactatttacgaatgagtttaatagtggtggaaacatacttgtgaataccattctgggaaattctcatatttttttacagttattcccaaaatattcacttctcctttcttaacattgtttactgagttgacagttgtaacactgttaacagtcttatcggtggcgtgtgtagtagagtcaagatcatttaatggaaggaatgttggaaaatggttaatttgtgttaggaactttaacatatcttccattttcatgaccactgattggtcattggtgagtgggtgtgcaactacatctactttgttcttcaatcttatatcaaatagcacatgaactttattcctaatcatttattattactatgtaacaatgtagttaatagtacaaatatgtgtaaaactatgtaaatataagtccccgggaggacataactaaatccagtagtaggaagctccgtaacgcagtactctgtatcattcattgctgaaaaaggcgtcaaattaccccttccaacaccaagcaaacttaacatatcactctcatcgcccatgtgtagcttatttacattcaaactcttacgcaacaccttccaattcacctcggtatcctacaacattttagaataccatactaatattatggcatataaatagtgcaaataaaacaaacgtaaagtgctgaaatgagataatagcgtttggaagaatcaagcatgaaaagattccgaatacagtcatcacggaatccagccagtgacggctcctccaacatatccttaaccgtgaccaaattcggatgttttataacctatcaaatgttaaatttagttcttatacaatattatagttatatataactaaatatggtaaaaagttctggaagtactttatagcgtaatccgagggtatggaaaagtttgaaaagtttatcgacttgagtttcggacattttggaatacaatattttacaaaattcaagttaataaaaaattttctccctaatatttccttaaacactcaattattatatcgtgttacaccactaacaaattgatgattttccgttattttactacaatttattaaaataaatgccaaaaattatctaattttaccaaaataaaattaaactgtattattacataaaattagccataaggtgttaaattagttataagttgataatggatcagtcttcttccagccaatttgcgaatgatattaatcttggttccttgaactgtttaattttagcccagtttgggaattcttcaaaatttagcacttccgagtgataaaaggcctccattaatttacaaaaatacaactcatcttttccattttctacacataatcttaatatttcttcaaacaatttattttccaaattgttatccaatttggttttgaaagtgttaagtaattgttgcaactgcgatttttccatcgtttcttctatttcatcttcttgagcctgttgtattaaccatttaattgcaaatttatgagtgttaaatgtcatttcagtttcagtaatattatgtgctaatcttaggcttcgaatttccaataacttattttccactaattttggctcctctaaactctcaattatcatcatttccagctccaaattttcaaactcatgttcatcttcgtctaaatcgccatctaaattatcaaaatcatcatctgaatcaccactaaattccgttgagtgagtggaatcgtctgttagattatcaaattcaattgtgaatgtggtgtgattaaagaaatcatcaccaattttataaagcgaaaaatcatttgtaaacggttccaaattccataaaaacacttttccatcaccctcaacaactaaatcctcagttaggtcatagaatttcgtctgatccattgcacagaacactgacttccctctattatttaccagttttgggctaatttcacagtttttcccaatcacagagcctgaaactaggtttactccttcattaataacgcagttatccattactattgtgtcaacaatattacaattattatgtattgtaacattgtcaaagacaatactattgacaactgtgacattactgccaactctcacattatgtcctaaaacacttttcttaacactgttcatcatagtgttagatgcactggctactatattttccctattaaaatatgaggtttcacttattctaggaccaatccctctatttacatcatccattcctttcttacccctaacactactaccactatcaatactactatcagtactatgactagttagaaaccgctgtatatattgcatataaatagtatgataaagtctgggcgagttgattttaagagctgctggaaagtcgggaaaagctgcgtcattttgcaaagtataacagtagatttcagaaattttaatctcatcagtgagtattgcatttactaattgagacatgcgatttttgtcaaactgttccataacactttcaatgatgagtgaggagcagagatatactgaagactccagaaggtcataacgaactgagagaggattaaaaccagttcggctaaaaaggttataatcaaaagatatcaaatccgtttgcgatgtcaataacaattctccagtcctttcattcgatattaccactccatcattctccatatcactatacctataacattatataacattattaagagtatgagttacagtttggaattgtgttgtgtgtaaagcattgtcattgtgtatttggaattagtcttcattaaattatcatgaaactctaaagcgtcagaaatcggaacactcagcaaagtattactatacatctacaaaattattatactattattacgatattattatagtaaaataaggttaaattaagtattaaatacgagtagaaattgttgtatattggtgtgagtggtgaaaaattctcttaatgctgggccgacatccattttagtaacatttacggcaactacttctattactaattgtgagtcccttttaccgatactgtaacttttttctagggccatgtatttattcagcttatatgattccactaaaaaatacacctttttaatgccagaatggtaaatattagtgagggattccatgaaaatagtggaatctccaatatacaaatccttcacatcagcataagaagttaaaggctcaaatgttatagtatcacactcatgtaatattatcccctccataattatataattaatgaattataatttattatgaaaatggaatagtgtgaaaaataagaaaattaaaattattgtgagaaattagttgtgtttgttttcaaaccaagaaggagcgtcgataagtttaaccggaggttccatgtaatatgaattaaacgaagaaatatcattgtaaagatcatctttacacttatttaacttagtttccaaatcagtacataaaccttccatgtactcatttcctctaaaaaatatttttacacattcataccattatattactatcatatttattaaatatttgtattataattaaaataggcatgagaaggtgcaatgggtaacctgttgagatcatcacattcttcgtgatattgtttggccaggtagaagcaagaccaatcagctttagtaccagagagaatattaatattatttttaagattattttcttttagtcttttgttggcgcgatcgccaaaaaagtgcgataaagctgcgattccgattagagagagtgtcattttagtagtactaggtaattttgtaaaaaatgtaccaaatctactataagaagacatatcatcgagtattcaaagaactataaaaatctatccatttatttaaaataattataaattgtgtaaatatatgaactagagttgaaaatgtgaaggcgacccaataaaagctgggttttacacattaatcagatgttatattaacttctttattaataaaatggtgtaaaatatgactaataaatatggtaatacatcttttgtaattttagtggttttcgtttttatcgccgctatcttggattttatcggaaccttctcatatcatttaaattttgaaggaaaaaatctcttcgttccttacttttcagaccgaaatgtagttccattccctgttctttttagggaatttgaccttagcaatgcagattccatccgctcaggagttaaacgctatcgtggctcaaatgagcgttgctctcgcagactacttaaagaatatgacagttacagatataattttcaacatatttttcaaaacgttcccaatcaatcgtatcgatcccacacatatcccactcttaccataccattacatattactatatacactagcatactcaacacactatagttaatatggttaattgtatgactatagatttgtggcgaagtgggacacaccccctggatggttatcatatacgccagtggataaactatgcttaaacttgttggacgcttataggtttgattatgtggtccaggaccctttactcgaccaaaattctcatactgttcgcaacatttatactaataaaatgagcaatttctatgatctttttgatgggcttgattttgcacacgatatcaggctttttaaattaatatcctcatatccaactcttaccatttatgctgttaaaggcattatgtccggtgatatggccaatgttggaatggtaccgctttactagttattttcttactacttgtttagttttacataccaatctagtattattaactgtagttaaccttgtcaatggtataataatgtgatagataagtgataatcgcaagccttctgacctaaagctagatcactcactatttcaatttcacaacaatggactcaaatctaacctcataggttcattcccacttctttacacatctcttacacaattatatatatttagagtgttatatttagttttttatggttggtattggatgatggtggtttaggtgatgtaacatgttatgatttggccccgggttcttttgatgttcatataaccaataagcacaaaaatacagtcaatgatatttacaacgcggatcaaatggtttatgataattatactaaatatattccaaggtactgagtcacggagctggtacatacctcctggggactagattcacagttacaatattaatggttatgtacaattatgtgtataatatcgctagtacggaatttaatatgttgtagatcagatgtattgatattacacttggttggagctgatcacttatcgcattgtggaggacgtaatacacgtgaaatgtccaacatcatgagcaactacaacacattcgtcaaggacctcatggaccagtatgaaaaatacaagaattatatgatatttttctttggggaccatggtcaaaaagaatccggttcacacggtgatgactcacttgaggaggtattccattacaaccacatgatttttgccacaacctactcagttatacagtttttatactatcaacaataccaagacacatagttatgttttagatggagacgtttttgatggtcagaagtgacatgagattacgaagtgttgcgcgtgacttttgtcccatctctgagacaccccaggcctaccgtttacaccactcagctttaaacggtaacgcacaactctcattcgagtatgaaagacactttacacaggatatttgtactacctcatcatttctcactaacgtacccgttccattccactctgtaggctccgtgatacctaattcaatcccactgataagggacaataatggcaacattgactatggactttcagacaagtatctggttcagctgtaccacgtcaatgtacatcacattttaaggattctagaccttttgacacagaacgaagactttaaacttgatcaaaagatgtttgacagagttttcaaaaatagattacaactggttaatttgtatactcttttaaggttattcgatgctaacaaaacaaacactagcgatggtctgaaaacaaacggtgaaaataaactaaaaagtaaaatatataatacaataagtagtaataaggggaatttgtataatgaatatatcaaaatgtgtaaaataataattgaggaatcggcggaaataataagattatcagcaagatcgttcacatttcactacctttacatttcaataattatcaaatacgtttcaattgtcatactagtttactcaattgcagcctcacactatttcatagtcaacaacagggattttgtccgtaaaatcttactcaaactaataacgaatttactattgacatcagttgtaagttgtgtgtttggagtaaaattggataagaaaattgatttacattatgtgaaattcagattagtctggccattgggagtgataaaacccttgtttacgaagtcacagactttcacaaggttcatttctaacttttttgttatcgaagacttcgatttatacctacacttttccatactcttcatggtcacactaactgttatatttctcatccacttagtgactttcttcatcagctacattagactacgcagtgacaccgttagtgtggatatagctgatacagaagacactgaagataattcacagtatagcagtgaacacactactgatgctacggataacactagtggcagcaatgttgatgcgagaatgaatgaattgagtagatttatgtataacattggaaaaattaacttcaagagtataatattagtgttctatggtatcatattcgtgttggtgatcgtgtcggaatgtgcactgtactcacatgacacgatttcaaggcacgagttcgtgattttcatgttaattgaaactttgccatttttgctgcagaattataacactccacgatgtaaaatggtggttaaacatttggtggtgttatttgtgtttttaaagttgtcgtcactgttccacgactacaggttgttcttctattcctcagacttaccgtcagctaactggctgaggaaggagtactttctaggtttgtttgaggtcggagccatttcccttaccgtgtactaccttatgttactgagggtcttaaagaagttcacaagccctgacaaaataggtttagaaaaatttgactacacaatttcagagtgtgtgaaagtgtttaaacccattaaactgatgaaactagtcttcacgttcaactacgtactaatattagtgaattacggcttaaccacacagaggtcactgttagggcttgataagtttatccataatttacacaacgcatataatatgaagttgtttataagcaccttgttagcgtgggcagtgctgataatattcttagtcactacagtattaatgatggtaaaccccaggaataagttttttgagcctggagattaccgatttagtagtttccttttgtacagtatattcaacatatcgtatttgttacttctaatttgtgggcagaaaaaggcctttcagacagttctatcgctaattattctctataattgctgtaaaatattagttaataccacgagtggatttcacctgtcacactcccttttgttgcagtcgctggctgacgcggcttattttgccgtaggaaacattgacacctttttaaacttgaacttccaaactgggtttgttttcgttaacacttaccaccagctgatatccgactcttctgtcctgttcgaggtcatgtccatccacatgctcttctcaattgttctgatgtttatattttacagtttcaacaacttacagtttactgatcctttggtgttaatggacactgagcgcttggactctatggaatcaggccttaaattcaccggacaggatcatgaggttgattccaagaaaatttacacactaaaaaatattatacacatcattacaatgtaaggttcattagacagttgttcttatttttacctagttaaatggtcccaattattcttattttgtgttattatgccttaaattacctataaaatatattctattgatattttaggtatatattgttggtatctgcgttgggggtatcggtgttggtggtaataatgaagttacatcaagtcccatgcgtaagtttttacaccatattcacacatatttcacatagtagtatacatatattactataagtgtggattggtgataataatgggtttagatagcgtttcgatcgtttcctaaggcgttgtttgtgttgggaaagtcaactgcgatgattgtgactcaactactcctgttcctacttggagccatttactaactgtaacatatctcaatgtagttttataatacatattcattttaatacaataaacaatatatatagtatagcacattagtaaagtgttgaatgtgtaattctgggattaagttggattgattggaatggcgaatagcggttcgatttcatgaatattatattgattgtggaactggttgagtagagcggttgcaagtaaagctgtaaaggaatgataagggtcagaattctcatgggatttattggctgaaaagccaccatctgaattttgcgattccccaataaaccttgtaattctggcaatgactgtctgattaaacaactttacactcttcttgtagtatttaactaacatgaacattgttgctaagctccaccaaatgtaacatatatcatttgatttcccaacacgaccattcataccgccatttatacttatacgctccaacaaccaactatatccatacattaataatatgataaaagttgtcaactgtatattaaccatatagtaataatatagaattattatctcttttaactctattaactatattaatagtataaaagttacgtgacgagtaagtgaattctattgtgagataaagagttgattctgttgattagtactagggatccaatagagcagaaagcgccggcgacgtggctttgaccatttttagataatgaaattccgccatcagaattaaagtgtgaccttaaaaatctataaattctatccaaatcaaatgacttattaagttgatcagtgatttgagattctgagaagttgagtaacttatgagtcaaattaaaggcgcaaagagcagacatagtactcctaacatcagtgtaatcagtgtttgagtgtgtattaaaggagttgagagagttgaaaaagtaaccttcatcagggttgtaaagtgatttaatgtaatttattatggaaattaagtctgaactactcagcagtgagtgattaattccggaatgaaactggttgtagaggggaaaattacggagcaagtagttaatttcaatagcgtaaagagtgctctggatattattattatacaaattattgttatattccatgaatcccttcactccctcttcaaattgttcagtcgtaactacagaactgtcaactgagtcagaagtgttctcagtatcattaccagtggcattatgggtagtattagagttagtattagggacaatattggtattattagaattcacagatgtataggggaaagtattaatattggtgaaacaagagttgagaatattaagtagagagttgaggtttgattgcgatatcggctgagaaagaatagttagggctgaaattgaccaaaaagaaccacaaattagggacttctcaaataatagttttttcccattgaatttattgttatttacgccttctggagctgaaaataagttaattccaccaattaaaaaattattcaagtaatcacgcaatttattcaaatccttcatttatccatattaataatactgttaagtctagaatattttacggaatctcacaacaccataccatagtgtgtagaactatcaacatagtaatataccaatgtagtatattattgtagcaataatatggtaaattaattggttaaaataataattaagatgtgtaaattgttatgttattttttactttttgtttattttgctgaatcacacaccaataatgggttaaatattgatataaattataataatgattcaaatattgaaaatacaaccaattctattaaaagtaaaagttttactttattttcaattaataatacaagttactaaaaataatgctacacacagtgtgtaggtgatatattggtgaacaaattaccagtaccatatttatatattaaaccaaatgaacttgaaaatgtacaccaaatcgccgaatcagcattggtaactctttattatattttattatttttaggagaatgaatccatcatcgcaggtaaaacgcccaaaacttatcaattctcaacgcttatttcgttttatttactaattatattactgaaagtagctaaattataccatactactagtattatgtaaattgtgacagacactgaggatgtatatgagagaataatatcagaaatagaagagagatcgcccgaggagatgataatggacattatagggaaaatcaacaaattagaagctttaaaagctcaattaggaactgaagagtttctcactacttattaaattattacatattattatactatatacttaagtacacaattatttatatatttttatgggaaattataaattataatagaagaatagcaagattgaaattatctggaaagaatgcaacttatgcaaattctatacccgtttcacatcccatcgctgtaaatccaactacaacttaatttcctactcaataaaacaatactatatctaataaagtatagtaagtaaactggcatagtattagtatagtatgagaaattaaattagtgaggggttggagtgtgaccatcaacataaaaattacgtgtaattcttggcaatgttattcttatattatcgtgttcttttcctaatattacttgacaccccaatctactcctattcaatcataatcactacacgaaccattgattatatacaactgtgtaaatattatatatagaaccatataactagtagtggtacgataaccgtaatggacatacgtattagtaagacatggagctaaatcaagcatatcaagttcagtttcagaaggttcgggtaatgcatcataaacatcttcttctaatattacatgacaagttgagcaagccatacatccatcacaagcacctaaaacatattacaaaaagttgtctaataggccagttagggcttaactatactatataccaataataatgattaatgctgtgtatatgtgtaagaagtgtgtaagtataatgtgtaaaactggggataattatcctaatacaaaaactgttatctgaatagtctgggtaaaattatgatttagaaaaataccttcaatttcaatattgtgtttatgagcagcttcgagaatagaaataccaactggcacactaactgttatttcatcctcatattgtacaaacgttatcttaatactaattattattattagtatatataaatgttattagtatatataaatagtattagtatattattggtatataattgttagtaagagtagtgagaatacttttgggttgaaaaatgattataaaagtttttatgaaaaatgtataaattaggtcttaaaattttatttatcgagttattaaatatattacataataatttcattatacaaatgatttattatatttattactgttaatattgggagattcctcatttcaccattattacctaaattttcactaaaatttttataattttcaatatcatcaatgtaaataatattaacaatataaattttgtaaatattgtgaataatattaattaattgtatggactatgtctatatttaccgtaagttttttcaatagatccctttccttcgtcacctcgtttatgtgtgtttatgcttttgcaaatcctgatttggagcgaatttgggaatttcatccggcctttgatcaaaaagattacgccttcctctcattttataaagttccttcttatacattttactcaaatattggaaaaatttacatatttactccaactaacatatgataataggtaaatgaaaatgattataacgaatttgaaaagggaattagagggctgacaagatatttacaaaggaaaccaggtactgatacactcaactctataccatcaactatatattaatattaactgaagtactaaattatgctataggatatggatatactagattagtgagactagttgatatggatgataaaagtgatatattatcggattatgactacgtaggagtccaaacttggtttactcctgcttcaatgaagagagctatggattcttcgttttctcagaagattatttcaaatcttaaaatgaaaaatgacttcaactctcaactatttaaaattgtagtagatgattcctcctacacaccctaaaccacaccctaacccatactataccaatttaataatttacttatctaaagttaataaaatgtatatcattattttttatatattaatttatattaattatatttattgtcacagtcacttcgacgcaaatttactcaaacattcacataccgttggtcacactgttaataataacataaataataaaataatcagtaatgtaaataataaattaaaatctaagggtgaagacgatgaagaggaagacgacgtagatacaacagtaagtatatgtgtaacagtgtgtgttagtattagtatatttatatcttagaggtgggattcgaacccacgactagagcttattagttaaatttaaccatcaatgtactaccataccattaactactgttatactgctaatatcagtggatgtgtgataaatttgattagttggatgaagtggaagaaaggtaacgttacaaatgtgtataaatgtgttagaggcgaagaagaagacaatatgctacaaaatgccgaaggtatttataaaataattcaatcctaatcaattatatctttgaacattttacacaacaaactcagttgtatataactaatatatcctgtagatattggagtgaaagaatcaattgaagaagtattttttgactatttaaaaaattttaggaaaattcagagtcagaatttgctaattctaaactcaatcaatccaacaataacaatgtaatccactacacagtaaactatggttatgtatctatctgaatcacagaagaaaactattattattccagcgttaattatataaataaataagaataaaggaataatagtatagcaggaacctgggaagggaaaattaaaatatttgatggatgaattagttaagctttcattggaattaaaaaatttaaactatcaaattgattccatacaaatatcacaataatataatttttaaatttataatatgtgataataatatacaaataatgtgttagaagtggaatagtgtaaaaagtagtgtaaaagtgaatgtgtggtaatggattagtaaaaaataaaaatttattaaatttatagttatgaaatcgaatatattattatcaggcgcaaaaacgctaaaaaattatgattggtttgatcatgagttaccccttagtaaattgccgctgatgcccagcgtgctaagcactaccgtcggtgctggtataggagctttatgctcaattatagtcaattgcgctcttgtagagttatcaacttcttcttttttcactcttgtattttttttaattttatttttactttgctaaattatatcagataattatgtgtaaaataacgttgtttagtattttggctttacatttatcattattggacttgcgatactctggagattaagcgcttctagcgaattgaatgatcaaaaccaaactaaaaatcttaaaattttcggattcatggtaatgtttcacctgatcccagatgaaccgctacaaactactcatttttacatacactactcattcctcagtcaatatacattacatttgttactatttatctatagttagtgatggtagtggaaaatgttgtagattgtattttctggtgtattatgtttttttctgaggaagaactggttcatatcattaccaacatcactcaagactgttgtctacactctactaggtgtatctacctcatttgcactcacatttaccatcgtcgacattatcaactacttcatggccactctcgaaaccaccgtctcaaaaccattagtcgaatctaaatcacaagtattaaactacactatcactattcctacactccattatataatttgttataactaatacttttatctctggtatcaagagatatcaccaattaatggtacttatgtatgttatatttttcattatgttggtattggaacctgtttataggtccatttaatattatcgatcgcattattaatgggagcaatatttgggttcacttttgggttaatggatgtggaggacgaggctgcctaccacgtccaactggcgctaatgaaggaggaaaaatacacttatccaataggaatcctcctaggcggagctgtatctattacacacattccacatagttacacattttctacctaatttacgctatgatggatagttagcattaggatatataaggattgtgagtatatagtaataatgtggtttaggctggatttggtaatgaatatttaagacaacaggaatcttggagatttaatagagataatgcttacgatgttgaaatataaatttcccaccaaatattcattaatataattttatcaaaattttatcaatacaatatattcatagttaatattattatattaaatattaatatggcttaatgcagtatgtgtagcccgatgagaaacaggatgaagttcattattaatccctttaataattaagttaatttgttaaaatgttaatgaaattgactggaatctcattaatcacttcgttctcttatattaggaactcagtcccacttaaaaacacctttacagccttccacactcttaatacccgtaacggtatcaaaagtgctaaaactcctgacagaattagcagtttaaagagtgtgaatggagtgaggaactatagtagttcggaaggtttaaataacacagtaacctcatcactaattggcaaattaatgccttcatttaaaggaacggcattacttggcgacgatttagtacagtttaactcttcggattattttaaggattcctatggcctattggtcttttatccattggattttacctttgtctgtccatctgaacttttgggcttttcagaacggctaaaggagtttgaggagaggcatgtgaaggttctgggtgtatccgtcgattctccctttagtcacaaggcctggaaggagttggacgttcgccagggtggcgtttcacctctcaagttccccctcttctctgacttgagtcgtgaggtttccagctcttttggtctactccgtgacgaggggttctctcacagagcctcagttctcgtcgacaaggccggtgttgtaaaacacgtggccatgtacgaacttggactaggcaggtcagtggatgaaactctcaggttatttgacgcagttcagttcgcagagaagactggaaatgtctgcccagttaactggaaacaaggcgatcaagccatgaaacctgattcacaatcagttaaacaatacctctcaaatcgtttcaactaatctattaccatactactatactaatagtatatacttaatagtatatagttaatagtatatagttaatactatagtttgccatactatatacctgtacccaaggtactaggttcgagtcccacttccggaacttattactcatttagatattcgactaccatactattgctatacattctatatcctataatatacatactgtatagtatagtatattttaatctagtgttatgttagaatatggtattcaggcagtaaacaggccgaaaatctaaaatgaaggattcatggaatcaaaataaataacaagttaaatagaagtttttgttccaaaaaatgtaaaaatgtccgaaatttgttgtaatttccgcgatttgctgagatttttaacgttttaaaaccttccggtgacccgagatttcaaagttaaaaagctctcacaatttaaactaaaaacagttttaacctcttacaatagtcatcttagtaactttttgaccttttaaagtataaatttgactaaaaagtttctgagtgtgctggatcaaaaaatgtcaaatggcttccaaacgaagtcgttcgacccatataaccgaacaattcgactaaaaattaactgctaaacctatattctggctcttggcgcaagatactacttcaaaaaagctgcatgcacagattttggtaagaatgtactagaaccgcgtgcaccctcctggatccccattggtccttttatgtaggcgtttaaggatgtgattcagtataaactttttgtacatccattacagcaaccatgaactgcttttacatccttttgtttattttttctttgttcaaaacagccttttcccaaaccaaaccacccggactaccatgtgtgttaaacatctcaggaaacaatgatagaaccaaaatcgatattgacgataaagactcctcagtaacaatcttcacaccaactaatggtacagaagtgcttgaggtggtttatgggtctcaggttctctggaaaaggacaaagctaaccaagtttctcagacttctgacctacaaacgcggcaactcactttattacctccagttattcttttccagaggaggtaaaatttatgcccaaaccatgagcactgatggtgaaaagtggatcaactccaccaccttccggcttacaaaaaggaatagcatggagctgtttggagaccttaatttaacctcaggctcctctgaagatgagaatccttacgaaaatcctgaccaagttcgccaagaaggagctgaaaatgagcctaattacgcggattcagttatccttcagcccaaaaaaggtgaaagtgatgaagacacctctgaatcagattcatcctcaacaaagtctgaaccatccctaaaatcggagtcagatgcatccacaacaaagtctgaaccatctgacaaaaataaactcaagagctttggcaaatatctaaagaatctagcgaggaaaggcccaaagaaaaaaggggagtccacgtcaaacacagactctgaaggggaatcaagtggtgaaagcacgcctattaacaaagaagccaaaaaacctccacaatctaaataccgtgtagaatatgaggatcttgcaaatctcggacctaaaccctctgaaacagagactgggcccaaattaccaaaaagatcaccaccagtaccaccagtaagaacagtttcccttgaaaataaacaggttgaagcaggcactagacccagctcacctacaagactatctccaataccagaaccaagaactcttttcccaaataaaacaacttctgaaacagaaactggatccaaattaccaaaaaggccaccagaaccaccagtaagaacagtttcccttcagaataaacaggttggaaattcagcatcttacgtgagctctagtgattctgaaaattctgaaactgatgagaagcctaaaaaccggaaaagaaggagaattaacttcttcagaagaggtcgtaacaataataataccgaaaaatctgttaaagaagacccgatatactcaactattgatttacaacctggtcaacaatctgatcaaacatcggatgaatcaactccagatgaactatctgaacccagcattgaggaatccaacaagactaaaatgagaccaaaaagaggtaccagcaactccttaaacagggttagaaaattattttcgcggagaaaaaagtctaaaacccaaatgaatgaggttgaattggacttggctggcgatttggaaggaatagcaagggtaaaacatgtcactgagattgatattcctgttaccgaaatgatcatttttggtggaaatttagtgaagaaaattacagataggttccagacagtgtggaaacatgaacgtaagtcattacctctgagacaggttcttctgtttgcgaagcctgggtaccagtctctgctccacttaaacactaagccaagcttgtttgaaggcaacccaaggatgtacgaggacatcgagggccaatggttggagataactcttgaaaggttcttgactaagttaggtatgtctgcctttaacgaagttgacacgtactacgagaataagaaaataacatcagatacgtttgaaattccagaagaatttacgaaaccagacccgaacggttcttcaggtcttgaacctggatctaggcgtagtagcacatcatccactggatcagagtcaaactattcagtccgttcaattgaaccacatgattctcccacttcagagcagataggacctgtagaaacagacgacacagagtcagtttcaggtggagcaagccctcaagcgcctgcagaatccatttacacaacagtcacaccacctccaaaaccaccacgtctttatatctatacccccaagtcatctaatggagatattataccagaacaggaatctggaccagcaactgtaacaccctatgaatctagtactgggaaaacactaggagaatctggtggtgacgttcacagcacgttgggatcaaagagttcagactcacagagtagtggaagctcttttgaacgtataagcactccagatctagagaacttgcctccggattcaagtataagaccactcctaatggacgaaggactcaatctctactcaagtgacggattttgaaccactaacattaaatgatctaactctaaaacattaatttgctctatcattatttatgttttagtcaataccaatgtggtaaatctatacctaaatttgatggatctatcaataataccatagatcaaataacttagatagatcagtataataatattgcaataaattattaaaattgaagcaaagatggaaatcaatgatttatatttttatccactagcatcagtttatcctaaaagaataccttcaaaatatagtaacaaaggcttgaaacccaaagttttagacttatcaaaagaattagatccaattgaatgtagtttatccagaaattgtgacatactttcttattttgggctttttcacaaagtttacaacaaaataattctatccaatcataaactaataaaaaaatttagcaatggtaatatacctgaagacactaaagacgaagaagttgtctgggaatcaaatcagcctgaagattatgttatatgtgtcgaggctcgtattattggcacatactggaacaatagaagaatcacactcgtctctgtagataactcaattaaatacctgaaataccaggatggcaagtgggtggaatctagagaaattgtactcgacatcaacagtttgaacacgggcaaacgttacaaaatctttaaaagaaataacttgaccaattttcaagcaaacgataaacttcatttcagtgaaattgtagaaaaaaattctgaaaacagtattatatccccaattataccctagtctatttaattaacatcaataggagtattattctcttaaagtggcaatagtgtattatattatgtatataaacagtatgacacaccttaatacatatagatatatattgacattttttatagatgagattgttacgatttggaggggtgattcagaccataggtattgtaaagttgtttctttatttgagatgagtaatggtaacaaggtcatggcaatgttattcttgggcaataacttattgatatactacttcgatggtatctggaaactcaaggctgactccctcaaaaacaatgacttaaaaccaaggtatattaaataactatacaaaaaattctatagactagatcacctttctttccctcatgtgtcaatagatgaagtattcgagttttcctccattgttattaatcttttcaacaaaattactaacccattctcccagaatgactccaataaaaccattgacaaagagtctgtaacactggaaaataaccccaaggagagtttaaatgaaatagaaaacaattatatgagacctttttatggcttggaagtaactttgcgtgatatgtatttgatatatagaatctactttactacttctgggcactatgccgataaatcatataaatatgcctttataaacctaatttatccaagtaccgtattaaatgacaaagattcttttcgtgaagttgatccacgttctaatttttatcaaaacactcccctttactactcattctatgaagatatcgactcaacgaatacaggtaacactgtcattaaatcatccacacagttattatagtatatagttgatgtattaatatattattatagtatatacttaataaattattataccattatactatatagttgatttaggaaacactgatgtgaatactaaaaattcaaatgcaaccagtagtgaatcaaataatggattggatcaagagtatgaatatttcaatgcagttagtggcgaaattattgatcgcaaaacagattccgtgacagtcaatgatgtaaaaattaggttttttagtactcatgatgataccgtcattatcgacaatacaactaatgataattataatgaagatgaagttgttgactttggttcgttacataataaaaattgcatatctgataatagctgttgttgttttgatagacgatcagcttacattaagtatttaagaaaaataaacgacaagagagagaagcttctaggtgttacttcagtagccttggacatcaacagtactgaaccaactaaagagtattttataacaaaaagttgtgaaaactttgagtttaaatgttattcacgttacaaatttaacaaaatatttcataaatcagaggaatttggtgagaagatactctgggaggataaacttgatacagaatacgcaaatcaagtattcctcctacatcacaatgacaaactttgtctttttattctttctgagactctcaattgcagattgctaattcttgaccatgattacaatcctgccttcaataccctagatgatggaattaaaattgatttaaacaaattccgattttgtgatatggataataaaaccatagatatttttggtatggataaacgtgactcatgttctagtttttactttcgttattctttcccaaataaatgttattttatttattatgaggacaaattggtctggagccatcctgattctcttgagtcactaacaaatgaagaaaaagatgaaaaaaacttattgcatatacatttaatggtttcccattttttactggcgatggtttatacgcatttgatctgtttctccttaaaaacttgctcgagttagccagtgtaattgtggatgaaaaattaataaatgaaccagaaaaaaaattttttaaatttaactctgatgaatatagatctcaagtgccctcaacagttaccaaacactatcacaagtacttaaatttgaaatcaaactctaaaaataactaggaataaactcttaatatactaatatactatatatggtgtatgtgtatagtagtatgattagattattatacacttttactagtactactgtcttcagaaatactggcacgaattgctttagagattgtgtaaatcgtgaatgttaaactctacgtcttcttcttggtctgactgagttaacgccagttttaggtagtctgggttcatgaataagctgactgacttgtagtccgatggcatgaaaggcttgtaaaacgttttctactcgtgcgattctcctgaacttgacgtctacagcaaatataccaagccttttacactttctggcgatattctctcctatcctgtacgcacatttatctgtctgttgcatcttctttcggtagccaacgttgccagcaaatgaaccaaatactgtcctgtagtttttactgcggttaacaagctgagcgtgaacgttgttcttagaagtggtcaggactaacataaaccggtccgtaggctcaattataagtccgtttctgtcaagatcaacgttgtggaactctggaaggccaaagttccttctatatctctggtagttaccctgaaaattcttcagttcctgctttgtcagagtcttgctcaacacgggtttctctctgctctcctcagaacccgtagtcatgctcctaaaggatacacaccgtgtcaaatcactcgatgctccaactttgatcccaccaaacctccataaatccctcaatatcgagaaatcattaaaatttactacatttcttgttagaatccgattaacttgatcaaagagcgaatttcctattttcctccccaaactaacacatttatacatttattcagttttcaaaaatattcatactaattttatcaaaataacataaattaaataagttttatgaaagaatatttatgcgaagaaaaaatggtgagaaaattattcttcggtaaaagttaacaatggttcttgtgagttcatgatttggatggaatccttttgcttttgtttcttgtacaaatttgaatagtacaccacgctatcgactttgccttttagtttgagtagagccttattcatggtcaaacgctgatttatgtgcttatttaacttaatcagtgcgtttctaccctttttactccctgtaaacactgcagaatgtttcctcaggagcgtgttaatccagccttctcgcgagtataactggtttggagtccttattacacttgacgttatgtactccagcagcgatagtaccaggggcggagttagttccgccactgtgtcctcaattgtcgcattatcacgcgtagacagaagcttctctaccaactttctatcactcgtcaacaacgcttgcgtcaacatcactgaacaacttttattcctcttctctacactcattattaataccatagtaataactacatactatttatctcagtataaaatgtgttaactcgtaacaacaaatttattaattttgtctactcgtgacaactacttgtaaactcgtgataacaaaaatttaaatattattaatatgtgtatctgtgtaaaaatatgtaagattcatacgattatccatttcttttatgcgtgattttatatttaagagctgagttggagataaaggtgtgatccgttctccaggccgggtgtcttgggtactgtttcccaaatatatatggtgtaaggtgttttggaacacctcgagaacgcggtggagggtttgataatgactgtttatgccttggattagcgccacaatcaactcctaaaacattttacagagatctactctctacataactaattatacacgaataatattccatgtataactagcatctagtggtaagaatgaatataactggttaatagtatattatctaggttaaaaaagttagaatttttgactaactattaaaatattaatgattagtgtaaaatgaagataatagtattaatataataggagtgagtaattagtttgggcgttaggttgagaaattacctagaatgggtatatgccacttccgaataacgtatctacaagaactacagagtaatgttaatgatcctctatgccacattaaaaatttaaatcccaaattaggaactgattcaactaaattgagaatagattcatccaaattaataaaactactaaaaatttataaaaactattaaaatacaaatattctagtaaaattgataaatctgcgatataaattattactaagattaaactggttatagggtttattaatgttattcagaatcataataaattaaatatagttattatcgtgtaatttattaaaatgactgaagaatctttatttttgtaccattctactactcccagtaagaaccaaatggttatgaagaatatggacctgtaacttcctttatttacttctaaaaatcacttattttacctttaattcccatttaatttacttattttagtattagacggtggaaaatagtgttaaataaattgttttagtgatttgtgtctgaatttaatgaaaggaattgaggtttctgaaaaggacttacaaggtgtcattgccaattacttgttcatcaacatgtacgaagatacttacaaattcttcatacaagaaacacattttaacggtaacattttcaatactctttatttttattcacttattacctttatcaactcttaacatcaccttttcactcttatttaacctaattatacaatcaaattcgattatagttatgttattttatgataaattgtaagtagtgttatgatgaaattatgcaaatgataattcctattcatatttttaatatgattgaggaaacctgtcatccttgaactgattacacactatactattatagtattaattatatattattattaattatgtattactattaattatatacactattatagcactgttgtaatataattatatatttctgatattgtaaaatttgtatgttatagatgatgggtttaagcctacgatatctgagaggaagtttattaggaactccattatggaggggaggattatggacgccattaatcagattaatcagattgaccgcaatgtatcttcgttacgtcgcttgcttctactggattcagttatatcccacccggggacttagatttacacctatttatatcattaactacattattatatattgattgcatattaatataatgaattgttatagattttgaatgagaacagtaatttattatttgtgttaatgttgtatcgtcttgtcgatattatcctctcggtatccactacttaccatccagttataactatatttatgtatagataattatgttgagaatatttgataatagggtgatttacatactgcaataaaatttgccaaggaagagatttcatcttgtatcaagaaagatgttagttttcacataattgacacaatttagcctaacctccttacaaaacttgaagaagccatgtcattgctcgcctttcaaaatcttaacgtatcactcatctagttccacagttaaataatcctacagttaaatgttgagataccttatatatttagttacacactcatctaactagtgtatactattgaattgactgtagtcacctgaggcattggagataataaagaagattcagaaacctgatgaaatatcaaatttagtagacaattcactgattgcctattataacctcgatccaagtattaatacttttattaatatttttcagaacctattttggagaatattattaaggaaacgctttgggttgagtcacaacttgagtcaaaagtacactaaatttatttcattatttttcagcctaattcctacagcttaaaactatcaaacattagccgttgcgggttcaaactgtcatcataatccaatccctcaaaattaactaaatttcaataatttcaattcaaacaatccaataaatccataaataaagttaagtaaatttagagtaatttttaatttcttgaacaatattatagtagttcatatcatgtaacagttgtttatattgtatagaaatagcacattagtatgttacagcgattaatagcgtggatgaagtgaattttaaaatttgtgattttatttatcacgttcgaatgcgaagtggtgtatgtgttttgaatttttaactttacctattttcctttttttatatttccctaccattacattacgtttctcctccaactcctgccttaatttatccagttcactcttcacatgttttacgcgttttacggaatttttaccacttgattgttttacaccatttaacacattttcaccattcacgagattgggtttgggggttgaatctattttacaattttcaagtgaatcttcatcggaaaatataatatggccctttttattccgaaccttattattagtagcagtattaacattggtagtattggatttgtgagtgttggtgatatggttaagaacgaagaggttcgtattgattttgtccaggttccgtttaagtttaagctttttagttagttttttctctcttagagtatcttcagtgggaagaatcacctggccctggtcgccgattcttgagtttatcatcttgtaattaaactcatcttcgttcctatatctgccttttaaactgagttctttaattaggcgttccctaaggtgatagtgttctgatctttttttgtagtctgccttcttctccaagtactgaccaactctcctcttcctgtgctcaggctgggacctctccaagtgaactcttctgggaaccacgtgcttcagtcctcccatcagatatcacgagtcaaataatttacttagttgtactacacggattttgtcctaaaatcaattaatcactaataatttagagattactttttgtttaaaggcgacaagtgcgatcttagcagtttgacttgaaactcgataatatgttattacctccctaatacaatattaattatactaatcaacagcattatagtactaaatatatactattagtatagtatatggtagtaaaggttggtgactagtaaaacatacctccaagtaactttagaatctataatgaacaaaagatatctaaagaaaaaattaatgtaatttaatcaattataatataatttagtaaaaaggcgtgatttatggaactaattgaaaaatacttggaatgtgagagattcggcccagctttagtgtaaatgactaaatcagagccgaaattagtgccatcagctgttttataaccaagtccactaaaatacttctccaaggctttccttatatcctcctcataatccaattccatacaaatccaccccttttactctattttacaactttttatcttattttacaactatattttatttttttacgactatgctgtgttttttaaaattgtattgtattttttaaaaagtttaattaaaataatatctaataataataatttggaaaaaataaagtgatttttcacccctcataaataacaacatctcacaccttcacaccatttaacgtttttaaaaaatttattaaacaaattattgtaattaataaattattgtgtttaataaatttcaattgttaaaattagattaatcaaattttaagtgtgagtatttgttataaatttccttcagtttatcgttatcattgttataatgagcctctagtatttcttctgttaatatttccaataacttgttactcgcgctctccccttcaccgaagacctcgctgttatacagcctcatcctggcctccatggcgttttgtatgatgtgttctggtactctggcgagtttggccacgtgcattccatgagagtctggacaaactcctggcacaagtttgtacagaaactcgacactccttgtttcctcatccaccttagccgccatgtggaacattgacacgttactaagactctctgcaaacatacacacatcttggaagtgcgttgtaaacacacatctacaacattttcacacaactataaaataactaattttaacccacaatatactagtttagctgaatattgataaatatctgatttcctggatggtataactaagcattcaagtgggtagtaagtagtgaataactaaaccctaatgctgggtgcaagctccgcaacgcagtacctgcaaccgattttggatatcttttctagagtagccacagcaatggctgtaccatcaaaagttgaagttcccctacccaactcatcaatcagagccaatgaactactcgtggcctaaaacattattaaacccaacaccaactaaatgcttaatttaaccaaaagagataaactgtttaactatgtgagttatagagttaatcactagtaactcggtacttttgaaagtattgatgagatatcctgcaattcaactaggaaagtacttttcccttgtaaaatattatctgaagctccaagtctggtgaatatcgaatccacaacactaaactcagactcaacacctatacaactctaaaaccctagtcacaaaactgtaaataatatattagttaaataattgtaaaactaagtcttctgagggtctaaataacagggtgtcctacagtaactaagtaggttatagcggataattcagtagttagtacaagcaccgtaacgtacatgaaacaaatgatccaatttgacccatgatgacagtcagtgcaatttgtcttaacaaggttgattttccacccatgttagggcctgtgatgatgagaattggaccgtcgaaaccctcgccaatgttaacactgttgggcacgaacttgttaccactgatgctgaagatgggataaactgagtctttgaccctgagaatattttgggatttgggatggagttttggacggcacattgggaagggcgagttcttggcaacagttgccagcgaggtcaggcagtcgaactgagctgcgatttcaattagtttacaaaacttatagctattggagtgaaacttgctcacaatctcctggtaaaactcttcctcgctctccttaagcttaaactcaaactcttccaactcctccagtatctgcactatcttcacatttctaccgcgaacaaaaccactccgtgtactcgttatctccatgctactcactcctcccccaaccgcatttcccgacacattatccaatttcttaaccatagctatattattatttgttaagagatttttaagtattttttaaagaaaactacctaattttagctaaataacagtataaaataataatagtggtagagtactaagaatcgtagttactagtgtattacgtgtattatcggcgacaggcgtagtggagcctgaggcggtgtgttgtaagcttgattttctctggtatcgttggaattcggactctgtcatttcaacctcgtatctgaatttgcaatgtacgaagcatgctgagggtgagatttgtctgatattctctagcactctgtcgagtttggccttaacagactcgatttcagctgtcaaagcccttgattttggccactcaacgctagagcacgtcttttccccagtgagctttagcatgcttttgaacaggatgacgtcatctgagcagcgtaaaaactcctcttcaacctttttcaccaactcacttttatagtttccaaacagattaattgattcgttgaggaagttgacgacgatgtcttctagtttctggaacttgtcaaaaagactatacaaatcatacagcttagtgtaaactcctctgtcaaagtatacagcccttttatggtagtttgaggctgtgtttagtatcttacctaatgaacgttcgaggtccggaaatctttccagttcctggtttagtgttgttactagtgggtaattatggaccagaaactccacagcctcgcttctgaggttgatggcatcaacgtctgtcagagggttcaggagccaatatctgagcaacctctctccaaacgctgttttagtatggtttaagtaatggaatagagagttcttctcagtaccttcctgggtgacaaagagttccaggtgcaccagtgctgagtagtccatgcccatgacttccagctgagaaaaattaaatggttcgaaatagcaataatctacaagtttgttcagaagcacaaggcttaggtacgattcagttaatgttagagatgtggaacactcagaagcctcagactcccatttgtccttaactttgttcaagaggttcttggacttattttgtggaacatgtaaagtgacatctgctgagtagggtaaagccttaatagcctttactaactccttgttatcgtataatacagaatccagtactacttcagccgggcagaagtggatcaacactgtcttcacctgtagcaaatcatctgtgtatttaacggttccaaaccggattttactcattgaaacgtccaaacacactatttctactgcggaaggagtttctgattttgtttcttcggattccgatggtgcgggctggggttgggtttctgattttgtacctgacattatgagcagtggccgtgactgtgatgtgagcatttcaggcgctgcaacagttcctggtgtaataatatcacagacgtctcttttaacagctctagctgtagttcctgaggccttattacgcttatccagttgttgtggcgtttcagtttgctctacaactacgactctgtagcctgcgttcacacaggctgaggcgtaggagtgaatgcttttctctgggaaacctacgtgaggcttggtttcagctcccatccatcgcaggcctgtgagcccctgtaatatacaggcatcctgataaaagagctcgtaaaacttacccattttgaagaaaaccaaagagtcaaagtgagtccgcttcacgtcccaccactgttgcatgcattcagtgtagtgaccactcctaaattcgtgagcccacctgtgtcctttcggcgggatccacagggtactgctatcatacccatcacccaaaggtttccttccctcactatccctcaggttcttcggctctagccatggcgggaatgaaaaagtccccttatacttgtaataattctcaacgtatgacctaaatcccagagaactctcacttgctttacaactcaaatataattccctctcatgaaaatccattgtatcttccttatctctcttatcttctctacccactgttacattatcgatatctattggcctcttatcatcaaattcatatgcatataataaccgatctattagtctttcatcatccattaattctcccttcacatttcgtacattttccacactgttattacccattgtgtcactggtactagctgtggcactcgtattatcattaattgtggtattagaattaactgaatcaagactatcaactgtagtactattgttaccagtggtcttcttcattatatgagacaggttttgagacccagtgagtaaattagaatcatcaaacagtaaggttcgttttctaataagtggtaaatcatcctcttcaagttcaccaattgacattgtcgactcctcctaaaatattttccatttccatactatactaactacacataactatatagatttgattactagggaaaaaagtcaaattagactattcaatagtattattgaattaatctcccttatagtatataactaggcatttaaggtctaaatagccaatggatgagtaaaatttggcaaaaatcagcagccgtaaccgagtattacatagtgtgtgttggagagatttgaatccgaaattatgctgtccattttatcgaaatgaaagtctaataaatcatcatctagtgaacttctatcgagtgaggattctactggtttgaagggttctaaaaccgtttcacgtctttgtatattattttcttcattttcacaatctagcattgacgtctcgagttcctccttaatttccgtcttgggtgccggcctgaagaacgaaattatcgagacctaaaatgtgtattatttatactcaaaattacattttttgatccggacgttctcgactgggacatggtacgcctttttctaaaactaacgcagaatcccataaatcacacacccaatcactactaactatttttatcatcaatattccagcaatattcttaataattattgcataaaaatgtatttttagaataaattaataatgtaaattagttagttttattttcaacgtttcttcttctttcccctaagtcacacattaatacttctatattatatataactaagaaattattgagtaaaaattagcttaaattttcggaattgaaaaaatacctcttaacgttgctagaagtggcgctaattgagccagttgtgggtttggtggaataacttgaagttgagccttgagtattacctctagacatatccttcctcctcttagcttgtttcttatatgcagttctacaacattttcaataccactattatactaactatatataactagttaatatgaagttagttgtgaaattgtgtaaagaagtgtcagagtgactctatggcagtgaaaaagtacctttcacttttacgtaaccaacgttctggatctggagttccaaccatattcttaggtttcttgtttcttcttttccttctttttctaaccttagatttaccaactctaaacattcatttacgcttgtagaactcacttttcttcctctccaatatcatacgttatcttatactcattctccaactcctcagcatctacatttcacatcattaacactcttaaaaatcatattactattttttaatattactatttttctaatattactatacttttaatggtactaataatatttaagaataatggtaaaataactgagttaactaaaatagtggttgtgtaaattcctaacaatggacactaacctataaatctgacttctcttataaaactattggaaaattgttcatcgatttcgataactgactcatcaaggaaggtttgattataaacaactcccaacttggctgacaaatcattcttgttcctctgatacaaagtcttgcagaccttcactacttcctcatggagcccattactttccaaatagttacagccaagtttgaccacctcatcacacccagactactcacaatattaccaaaaaacttaccttagggtttcttatgtagttatttaacacagcaattacatcactttttaagccaagtaatatacacaacttcacatataaacggtgatattctctgtaatgttcgttatactgattgtagtgttgtttgtgctgttgcaagagtgaaaatgcatctttgaatttcgactgcttaatgagtaacttggttaacgagagcacgaaatgttgctctccaaattgagaaatagcctgacgcaataaagaaaccgacttcgtatacttctcctcaaggcactgtaatatattacactaacctagttaagagtgttatatacctaaatattctaattaataaatgagtgtatagtgaataactagtaaatagaataagttgtagcgtgaattagcaagctccgtaacacagtaccataacagctgctttatatagtaataaatccttttgatcgagcgctcggttaaaattttccaaataacgttgtgcctctttcaagttaccacttgataaacaagcccaaacacaattaccatgaatcatcctcaactatacaacgtcatatttcataataattacatgtctaacagtactaattagttattggtagtagttaatatgtaattacttctgagtttgagaattttctggatatttgttcctttttaattaaactttcgattttcctaaccatcaacgttacttctccaggttcaaccctgtaatacattattgtcccataacgctaattacccagtaaatatttggtaaatttggcggatatctaaagttttcgaacgaataactattaataacagtggttaggttgtgaaacaaagatacccaaagaaaagttgattattcagcgataccaatacagttgcttgatcgacatccgatgtactaatcatcaattaacattattatcaaccatataactaagtgtataactgatatccccagtgactatataactgagagattaactgaataaatatggtacttatcgaaagttttgattaggtttgtattaattgatttagcgagttcaaagtttcctcttttaaaattcaaatatgctctgaacgcaaaaatgtttgcaaattccacctggtcttcagggtccaaatccactccttcctgctttaactcaccctccaacatttctacactcattattattactgtgctaatattacatataagtaattccctagtagtgaataactaagtatatatatttatccatgtccagttgggcaaaggtcccaacgcagtaccattagcaatatctagataatcttgggcacgagtaacatcatccaacaaaacgaaagcacacgcataattaaaatataattcgtaaggatcatgtctttcattcagtatatgatcatcaatcttcttcgctagtgagttcagtaactcgttacccttggaatgctgagatgaaagggataagtcaacgcttaagcgattaatggataagagagactcggcgcctttgagctttagtttactgtaaatatcactcgcctctttaaaattccctattcttagacacaactgggccaataacagtgtcaactttttatcattgaaatttacggttcccatatcagtcttttcatacaattcgtcctcatttgccttattaacttggttaacggaaccatgtttatgggtagatttaagtaaatcttggggcggcaagttgttaaagcacagtagcagtgttttcaaaccaggcttatatttgcctaatttgtaataacaataactctgctcaaaatgtaaccagcaacataaatcgttattataatgtgtcttaacagcctcttttaaactctcttttacgtcatcactattattcttatctgattttctagaagttgttgcggctggatgagggcgaaaaccatgaagccaaccgatggtttgcaaacaactgtgccatcgagaaagctgaatctcacaaaaagccttaactcggtaaaatgaattttcaccaggccatttcttcaaacctatatacaactcaataaaccactatatatctaactatagattgataactatataatattatttattaactatataaaatgtgtaactaaaacggaaaaatacatttatggcaaaatttagcagcctcggaatatctggcctcgtccaaaagagcctgaagttgtttcagacagctctggactgaggacaagtcaacattatcaagaatcgtcatcgattactctcaaattattgaaatccttccttaataaattactcaattgtgtctttaatttaaaatttaagcatcatttagagattaattaatgaaaatttgaactacgttagttttaattaggagaaaaaatgtgatttaagttcaaaactaaaatttggtaaaagcgatctaaattacttagaaattgcttcaaattactgaaagaataagttaattctacttgtttacataaaaattaaattataaagtaaaagtttcagtttgttaggttaattttagaaatctggtggattccataaaccatcactttatcattttttcaacaccccttttaatttattagaaaaatttattcttttataaaattttaaatttttatcattttactaataaatttacaatattttttcttagtttggtcaataattttacccatttcaaataatattttttaataactaaatgtgaccaatattttaatttataaaagggtgtaaaggaatggatacgttaattggtatttgtggtcgtgattttgtggctgtggccaccgatacttatgaaaagcattcaattgtgactttgaagaacgacgacgacagtaagataatgcaaattgacgactccaagcttctattgttggctgggccttgctgtgatcgtaatcagtttggagaatacattcggaaatcagtccactaccaccgctacaagacttcttttgacatgaccacaaaatcaatggctcattttgtaagacagcaattggctgaatatttaaggaaaagcccttatcaagttgatttactcgtcgcaggatttgataatgtacttttataccattaacgctataactactattatacctcttccttacttagttatacaataatgtgtagaatggaccgaaattatactggatagactatttggcaagttcaactgaagttgatagagcagttcatggttacggaggtcactttctccggggtttacttgacaaagagtaccacgaaaacttaactgttgaggaggctgtttcactcctaaaaaaatgccgtcacgaagtaaaaaataggttccttctggctcagtcgaattttagagcaaaagtaattgataaaaacgggatccacgatgttgatattgaagacgataacactcctgaagtgttccgacttcaggatccaaaagccattaaagttgattaatttcttatttcattatccagtacttttattatgaattatagtaaaattttagtacttcatgcgtcattcttttttctacttttaccaatatagtcatactgtaccaatatcatacatacacatatattatataatagcatattggaggattgataatattatttatcagttgagagtaagagagtattactattgagcatgattttattctgcgatttggagagaatgttagccacttccttagcggtttcaattctccgaagcgtaataaaggcagggttatccttaattgcacttccaataagccttgcagcctcagactctccctgagccttaattatcgtcgatttcttctcctcctgagccttcaacactatatatttactgcgttcagcttgctgttgagctacttgtttagcctctacagccttttcatattcaggactgaagcttaagtgggttaaggagacatcatcgagaagaatattaaagtccctggccctgttcaccagctggtccctgactgctttgctaactctttctctctgagtaatgagctgagaggcgttgtactgggccacaatactcttcagaacctcgtttattattgaaggcaggactcgctcgtcgtaatctttgcccaagtgcctgtaaatatccctgagtctgcgctcatcgggacgagacaacacacggcaggtgatgttaaccatctgcaagtcacggcttccggtgagagacatcagagtcctaggacgagtcctcacatcgtaaattattggacgttctagccagggaattatgaagtgcgttccttctccatgtgtagtctcacttattccagtgatacggttatatacaacagctctatgcccagctccaactaattcaacattaaagagacattaaatagtaaaatttataaaatatttaacaaattaaaaatcattctaaaaatgattactgttcaatataactacaataaaaaaatcaataaaaattaatgataaaggtttttaaagattgtttttacaattctatatatattatataataaaataaagctaatataaagtggaagtagagtagaatcttaccatcgtataaactggaattgacaagccaggcacctgaaccgaataataagagagcagagccggctccagtaactaatttagcgaatttatcaacaggaatctgagccattacaaataataaaaaaatattatagaaaacaaatttaacacttggggctatgactgacaatatatacaaaattgcatcaaattagtggtgaaaatctgaaagattctttttcttgtaaaattacaaattcatctagaatttccctatttacaccttcaatatgctttgtaagcctcgattttaactctccgaaagcctcaatacccagtggaaatgtatcatgagctactactattgtgtgcttaggtttaagtgttaaatgtacatttactgcgtcttcagggctcatgttgattttacgcttaaattcaggccctatgggtaaaattgcgatatctattgtacagttaagatccctcaggtactccccaatcttctcaaagtggtctgaaaagtcagttttcccggcataaaatatagttgagtgatcagacctgagtaaaaatcctccccaaaggactctgttcctatcaattccacaactcaaatacttccgtttagtctccgatttggcaggcaaaaatgttatttttacgctaccgaagtctacttcctcaaaccaagatagaggatatgtatatctatcgtaaaacatgttgaggtatttcgttatgttcatgccaccaattgccagtgctcctccctggtcacttattttcctcatcgtccaagtatccatacaatcatacgaattgtttgatagtagtaagaagtcagcaggaggaaacttccaatatttataccaatttccactcgttctcttaactacaaaatgtgttgtattttttaaaaagtacctccaagaccacctgaaaaaagtctttttgataaaactggatccgttaaaaatctaactccttccatttgtataaatactgttcgatggcccaagtatgtgacctcaacacagtcatctggagcctcagaaatactgaaatcatctgaccttttatacttatatttgggccattttccaatacttcttaaaaaaacccctaaacattatctatttaataatatataatatagtatatttaatgatagttatttataaagattacatacgattgagaatgggaaatttgcgtacagaataggtgaaaaatctatctaaagagtgaaacaagttataatctaatgtgtattgtgatttggtaaggtttttgtagaatccggccctagttctaaacatcgtgaacgaagagataaaggccaaaattcatcaaattctacaaagaatctaaaacaacaacattaacagaacaatttgtttgaattattataacacaaagtcctacaaaattataataatacctccttttaatccccatcctaattactttattaaataaattgttccataatttcgtttcatattattgttttatagttttcttaaaattaatcttaaataatggtatttttacataaacataacttattattttagacagttgctaaaaggtttgttcctctttttgatagagttttggtatcaaagataaagcctgaacataaaacaaaatccggtattttattgccagattccgccaatctaacttccagaatggccaaagtattctttttactctaactattttatatattttgtattaacatgtttaggttgtggcagttggtaagggtagagttaattctaaaggtgaaaaggttgaccccgttttaaaagtcggtgacacagttgttatccctgaatacggcgggatggatttaaagtttgacggtgaagtctttactgcttatcgtgaggacgacattattggtacttataactaacattaatactaatatactgtactgtataatatatacgtgtaagttatacgttaaggaacgattttgggccattttcaggtccattatataagccacagcccacaattctacaaaaatctatcaaaaatttagtgtacctaatttccttattgggaattccatcttttcttgctccatttcccaactacacatttcgttaacattatcccagctataggtatttggttatataactatataactgatctaaatatgtatcactggggaactaattgactaaagaactggtatatacggcagaaataaactagactaaattaataccatccgtattagtttcattcctttaacaacagtgccaacaactacagctttttgctgaaatccaggattactagtcaaggttattaaaaatctagaagaaactccaagtggcccatcactaaccattgccacatccccttcttgaacaaatgttgtatcaaacgattcttcaggaattctatacaaatatattccatttatgtatggtgtggcatattaactgtgtttaggtgcgatatctaataacactgtgatagttggccatctttacatagaagaaagtagttaatgaatatatgaaattaccgtttggaatatatagtacatgaatctagtgaacttttttgatcaaatagtctaccgcctaaaatggcccttccaggcacaatcttgtcaaatctggtgttatagtagccaattatcttatccttaattgggaatcctttacacatgtgaatgaaattctcaacagtaagaggtaaaaggcgcccgtaaaggccaattagaatccttcccaagtatcggttatccattgatatgtccatataaacgtagtctgtaatggctcttttatgtatattttcagccctaacggcaggtgttctagtataattaggccataatagtataccaccagctagtaatccctaaaacaaagaattataaaagaagaatcctaccatgtaaattttactcttatacgataattttgaaaacttgccataagcaaatttgaacaaatgataaggaaataataatgtattcctaatcatttttttaaatttatctaaaattcaccatttttatttttttaaaaattattaacgtaatttatcaggtcacatatttctaagcacatttcacaaacagtaaataaaaagttataaaataataaattatattaaaatgataagattaaaataatgttacaattattttgagttattttttatttttattaatataatcgttgatggcgtgcttaacggcatcttccgccaatagactgcaatgtatcttaacaggtggtaaattcaacttatctacagaaattcattaatatttcaaataaagttatctgtaccattaaggtagccaagttatataactatatatgacctttaatacctgaaatatctgtgttcttgatagctaatgcttcttcacatgttttgcctttaaccatttctgttacgtatgaactgcttgcgatggctgaaccacaaccaaaagtcttgaagcaggcatcctcaatcacctgatccttaatttttacctggagcttaatcacatctccgcacgccgctttgccaactattgcggtgcccactgaggggtcatccttatcgaaacttccaacatttctgggattattaaaatgatcctttacctcaggactataacgacgtagttgtaaactacccaaatttaataaatcacagacaccaacggtgttaaatcttgtaatgagaccaatgaacctagttgaaagcgtcatgatggcagagctgaatttgttactaaacttattctgttaattcctactagtaaactagatttttcaggcactttggtgccggagagttctagaattgaaatctgaccaagggattctaaaatttttgataaaataaattttcgtgcctgatgtaatgttcctgagacgcgaaccggagcaaaggagatatcaatgttttgtatctttttaataaatttaacgattaacagtgtttccttcaaaaacgcttttctacactgcagaagtaccaaattctcagctgaatttgcgaagggaaccgttatattatttgaaattaagttgccctgcagtaatccaaataaaaattcggcgcttttgtcaatttcaggcttaattattgatggtcttaaaattcgatctagactatttgatttactctgatcactcaactcgactttgaatactatccagcgatttttcacacgaaccattcacccacatatgatactattattatgctaaaatactactataaaatgaactctatttaacttaaaatatttagaaaaaattatttgtataataaaataaaacagattattatcccccatagcaggatagaattattactcattattccaccaattataatggtgatttcctagcatatctactcttctgaaagtatgcgatccaaaacaatctctttgtgcttgtattaaattgtatccttcctataccatttcaacaaccaaccaattaattaattgactaattaactaggtaattaaattaaataaaatccacaattacatgtttattgaacagaatttgtatatattgtaagctggttgcgattcctggtactggaatatcattttccaaacacctttttacaacatctttccaagttttcatgctatcttttaatattccgttaaacctattgaatgttactaatattttttatactttgagtgaaatggcaacattcgatcagtttctttgaatgattttgagatttcatttagcaaatcgcagctgattattgcattttctactccatttattacacttaattacgtacttgaccatatattagctaatctactcaggttcaggtcccatccaaactctctcgaagcttcgctgacgaggtgaaatccttgagagaaaatgcttattgcagtacaaatatatgttaattttaactcatctgatactttttattatttttttaaaattaccaattttatatttttcaaccctttcaccaacattattagtgttagggatgtttgaatgttgtgataaattactgaaacacctcatgtctacagaaattgctatggaaggcactgggaccgctctgtcaaatgcgtcctgaacagtccattttcctgttccatttgaggaaacacacggcaaaattttgtccagcaagtgttctaatacagtcattagttttgatttatagtaccatttccttctttaacttgtaatatcatctgtgtaatttggagcaaatacgaataattttcagagtgccaggcattaaatactgaagcaatatctgaattactcatcatgttttcacacttcatcagcttgtataattctgaaattacttgcattagggcgtattccatgccgttgtggaccatttttacgtaatggcctgaggagccaggtccaacgtaaaaatcctaaaaactctataaatattaaactaactgtatcgacttgtgacaatattcgcttaagttcgttataatcctccaaatttcccccaaacattaaacaggggtgtgtcaaagcgcctcgttctcctccactaattcccattccggaatagcgaattccactctgcttacatctcaaaatccttctttccgtgtttttgtaccactcattcccgccatcaatcaccatatcatgcttatctagaagaagaatcagtttatccagcacggaatcaacagcttccccggcctacaaattataaactagtacacaaattactgtaatcaacataagaatcatttttggagtctttaaacttgaaacctaaacattttatgatttttataaaaaatacaaattcgtcaagatccatataacatttaacgttagtcaaattaatagaatctgggaccagaccacttgatttaggttgttgattcaatttttcattaaagttatcgatttcctttcggcttctagtccaaacagagactctgaagcctctagagtacaaattcctggcgtatgcggaggccattacgcctaatcctacaattccaaactccgataagttagaatcctccatttacacccttaaaatttattattttacaaaaaaacttatctcagcatccacatatttatgaatccacacattacttagttaatttctttaataaaacataacacaagctaataaaataacaaataaaaatttaatgaaaactatgtaaaaagtaacgaaaactttataaaattagtgaaaatatgtagaatattgacaaaatattgacaagttgagtaatggcagaaaagggtgtaaaaaattatttgttgtaattatgagctggacctttacgattagcgatgttaggtccgtgttcattatattctagtcttgagatccagcatttgtggaaagaacccaggcttgagatgattgaggctccgatccagccggcgtgcctacttgctgccttggaattgaaggcaacgaacttacattttgttcctgaaaggggtgattcttgtggcgtcttcgctgatgctctgttcatctcaatgtttaacctctcctgaagtcctgaagctcctgacaaccccccgaccagtgcaatttgaccgaaaatgtccctcctatacgtcgaattatccttcaagagatcttcacaaatgggcactagtcccttaaaagaccccaaatccatatatttgggtacataagcaatttgagggttgaaaaaaacttcacaggatattccaaccagctgaaatgggttaattttatcaagactatttatgctcttggcgtccaacggtatctcaggcagcatacccttaactttagaatttggtctcagttttgatccctcctcggaaatttcaaaagactccccatctggtaactgggctgtgaagttgagctctgagtctaccaccaggggtaccggtgaaactcttagtatactttccttcaaagtcctcacgtcatgatgaatgttatacacattcaggctcatttccttgttgaactgccgttttcctatctcaactgcgtcgttcactgagatgttggatagggttgatacccccaagttgtactccgggtgattcattatatatgataaattagtctcgttggttccagccaggaggtttaggataatagagtctacgtggtctcctccaacgctgtgttccttccagcctgcaacctcatcatcggccaaaaaagttactgatgtggtggagctcccaatgtctatcaccacagagctgaaaagacccacggaatatgaggctaactgaccaccatgcccaaagtgtactcccggcactcctaagtcctcaaataacacttcagtctcaaccatccgattcttcctgcttgtctcattgccttcaactatgaagactggtctggagcctgaaacctcggacaatccggaggacacagagttaaatgagtgcatgaattcgacaacgttggcgggggtcaggagctctcggcccggaattttatccaagttagcccctgctatcatataattactaaaattgtcccagcattcaccgtcatgtttgtgagcccctaccagtaacgaaacctcatcaaaatcagtaccattacaggattccttcaagtgctcaatcatagccttgtcataaacacgtcctgaaagtgttcctctcacagctctagaatatgcgttcctgttaattacgatccctttattctctgtatcgtagtatttaacgtgttctacgttcttaatgcgataccttgaccctggaatgactgggaatacgtcagctccagagccaattccgaccgcagaagaccacaactgagagggcaaactctctccagaatatccagcccttatagtagaatgaccaacgtccaaaactaatgctcctacatatgggcctttccaattcattattattccaattttattcctataatatttctataatttacaacagtttacagtaacagctataattttaccgtagtttttataattttaggtttaatttgagtaattttaataatttacaggaaaatgagtaagaattgtgttattcacatttttgaatattatctgaataaaaaatattatacaaggggaacaagaaataggtcaaaaactacactgaacaacaaataagcattaaaatttacatggttagcacaacaatagggtattgactaggaatttccagttaattgttcaattaggagactggggtaccgttacacattttttcataattcttagaacaaacgaacacactttcataattgagatgataagtataaaaattaaattattttataaagcttcttctaattcttcctcttttgggagttccaatccttctagggattccggttcttccggcatttcaaaatcttcgtaacttctcttcctcatttcctcatttcttaccttttcagccttctttctaagtttttccagcctttgttggtgtaatttaattccttcttcatattcctttgggtaaagtataggaatccagtcctctccgtatacgtttgagaaatctctaacttcatccatatttacccccaacttcctcattttttcatcatttttagcatctcttttcttcctaaaatcataaatatagaagagtagtctcaaatatctagttaagtattaatgtgtaatgtaaatctatagaacctgtattcttctaattgttcttcatacaaatccttcagtgtttttccagcctccatgatcatcataggctcgttatatctgatgaggaatttgtgtttctttactgtgctccagtaggttgctctgagtcgcttcagtgcctggaggttatacttcttacaggcgtgaatttcagcaaacaaactcataaattttcggattagggggaagttgtcgatgaatattatcctcctaaaatacattaatatttcatattcataccttgcaaagcgatttataagcctacaagcagtggccaaatcctgtttgtttactgcatcttcgaagtgaccggtgtataacttaactatttcatcagtacaacgcattggccttgataggaatggtgaaacgcggtcaatgtcaattttctaaaaaaactaatctaaattaaacttacattggcaactttacgcctataagacagtgatctgaacggttttagcctctggaatctccacaaagcctttttcagcttcttcctcttacaatcaataagcctttggaaaagctccctaagagcgcataacctataatggtcttcggactcttctaaatggttcataatagaacggtaggcggcagtatctctaacgtgaattgggttctcgggggacgatttaggctcaacgtagtcttcagtgtatttgggaagcttttcgggtatttctcctggctcaagccatttgtaattgcgcttagaccccaaatcctgctgcaaaacgtgttggagaacatatctagatactaaaaaaggcattgtcctctccaaattctcaggctcagggtactcatatttcaatctggcgaacatcaggtggtcaaaatccttcattaaaaggtcgcagtccattttgttaagcacatctctgttgtactccattaatctccaaattgagttaaaatcatctctttccaaaaaatatctcaactgcttcatcaaaaccttgcgatcatagattttcccatacaagtcgtctatatccccgatttgcacccctggaaaatcacacaaccgagtgttaaagttaattttagatggatcatgagttctcaataaattttcgtagtccaggggaatgtgctttggaattgctgatcttggagtgggacctatctcgtaaatcggcttttcaaacaaacgccagtcattacgggtactttcaaaactttctatatgattttttgaattatgtgtattaataaatggaaagaatccaccatcgtgattctggataaaacttaggtttaatgtgtatgttttattcgttgacaatgaaatggaatttgagtaatttggtataagaaatataaaaattagtgtgtatataattaggaaattattgtacaatttaataattaaggtggacatttaataagtatatcatatcactaattatacatagttcaataattcattaataatgacacaaataaatacaaaacattttaaaaatacaaaaatacataaaataaattaataaatatacaaattttgattttttcacgacatcgtgattctcatcccacaacttatatcatttacacatttagttatattatttaacttttttataaaaatatacaatatcaaaatggttaatttagaggaatttaatttaccaccaaattctactttcttaacaaaaaatttaggcacacatttgagtttcgccgaaatttctcttttatcgcatttatttaatcccagattactaatttatatatttgacaatggttaattaaatacatttacaactctttaagatttaatttttgagataacttatttattattactatataataaatatatatgttatgtgtgattaaaatcatataaaaacttggatacactaacaaaaaaccaattaaattattgtataaacacaatgaagatcaacagagctctcatatatgttcttattaatctgttatttgtacagttttgtgctgctgatgaaaaagaggctgaattgagcattccaggtaaattggcaacattaaaaataattttttagaggtgaaaatcagaactcacgatgaagaggatgagaaaaaattagaagaattaggggagagcttagacgatgataagaaggtattaaattaaaacgcaaattacttttagattgaggaataccagaaaattgctgatgaggatgagaaaaaattagaagaattaggggagagcttagacgatgataagaaggtattaaattaaaacgcaaattacttttagattgaggaataccagaaaattgctgatgaggatgagaaaaaattagaagaattaggggagagcttagacgatgataagaaggtattaaattaaaacgcaaattacttttagattgcggagtatgagccaatatctgaagagggtactgaagctgagccacgtcaattgaaatcaaaacgaagcagaaataataaaagcaagtctttgagaaggcgaaaagcagccaaaaaggcaaaaaagcccaaacgatctaaaaaaaccaaaaaatcaagaagcaagaaaaggaaaaacaaaaaacgtaaaagtttacgttcaagcccggcggttgaacctgaacctgaacctgaacctgaacctgaaacaccaactccagctactgatcctgaacctgaaacaacaactgaagaaagtaaagagtctgtgttggaagattctgaaacttctattttaccagaattaaaggaagaagaggatttggaaaaggtagttgagaataaactcgataaaaccaagagatactgggactctgacattctggagcctgagcatgtaataaacgaatggcttgcaatttctgacgggaagaaatatgatcctcaaactgacgttaagttccccttcttaactgatgatgagaatgactacgatcggtactatataagtaagaagttgaagaaacgagacagcccacttaacaaatataagtctggatctaaattcaaatccgacgaagggttaagtactaactatgtgattcctatcattatagaagacgaattactaagagcgactaatccagacactaaagaggatgagttggaaaacatgataattaatggaaaatttaagcaaaattaccgagggagggtagtaaaccagaattcggaaagtgatgagctagaaactggtgatgaaaattatgatttacaggagtaccctggatcatattcttccgaatctatgggatcatactcaaaggcggatactgacggtattataaatagctatggagaatcgatttcaactaacgaagaaacaactgattatgagaataatttaagtgtggatgaatatggagatggagtgggtcctggtgggaaaactgactcagacatgtcagacatggttagtggtcaggaagaacaagtgaatgcccctgatagtatgaacgaggaaggtgagactgctaaagattccgaatgggagtttggaaatatggacctatttgatgaaacgggggagagtggtgaaaatgtagataatttatctaaaaaggactgtaagaaagagttaaaaaatcttaaaaagaaatacgaaacgaaacttaaaaaaatcaagaagttagcttctcgatagttccgatgtaattaaattttttgtactttgactttaagaatggccataatactaaaaatccatcaacaaaattatacaacacccgaccactgtctgagattgtcttcactctggtcaggctttcaacgtatactactttcgaatttctaaataataatacctaaattcacacattatataatctattagtttacatacattcaacagttttactgataaacaaaatggcacagataaggctggtccgtttgtaattacctaagaaaaaatattcaaaatcaacatacaatgtccggattaactttgtataaaatcgcaattgatttgagagtacaaggtaagaaaaatatggcgaaaaacaggcgaagtaaactcttatttgatgggaatgtaattgagtgaaaaaaccttcttttaacagtttcttcatctaatgttgcatcaacatctatacattattatttaaacaaggaatttaaccttcggatcctctatttagaatactaacaaaaaaatttaaaaacacttttggagaaatgcgatcgtattttgagtgaacaaattcaaaatcatatttttcatgatctaacaaggagaaaatctcaaccatttcgcgagtatgacctcctacaagattattaaccaaatgtgcaaagtattttaaaaatacccgggcctagtaccattattattttatgcttggatttttccttctttcttactctggcataccttccatacctcctgtacaaaaacactaaaattaaaaaattaggaattaaaaacaaaattgtaaaaaggaaataaatcataatgattctactctttactgtgtgtatagaatccagactggttactattaaatactgagaaacacaaaacttaaaaatttaaattatcattttaaacaaatttatccacaagtttagattctgttttcttctttagtgctatatgagatattgataatcggagctcatgaattcccaaaagtctggttgcagaagtagcatacacatattgatcgaaaatttcatagtctttaagtatatgaatcagttttgaatatttcaggtgtagttcctcaggctaaaccaaattaatgtcctaatccttaccttcaaccggtcacatttagttagtaccacttgaaagggtatttctatttcatttaacatgctccagagcttgaaatcttcttttacgggtcccttcattgaatcaacaagagaaagaatccgatacaaactgtacaatccatgatatttttattatttagttacttatccgtcctatccaggtacttatttacaagcagagaccactcatttctaacttcctgacggactcatcaacccataaacttacatctgagactttggcacatccatatccggggaggtccaccagagaaatattgttcccgaggtcaaatgtgaacaaatgccttgttcttccctaagtgaacttacgaaactcacactaaccggagtcttagaaacgggagcaaatttggggttcttcagcattttagcgttagaaacctaattattataggggttagataacatactatttttcttgcaaagaagggaatatcagttccgtagagaatagagttgatcaggcttgattttccgacattcgagtaaccaacaaaagcaatctaggggagaattagtggtttttatttacctgtggaatcttggttaatggagccttgtctatggtatcagatacgtatataggatgtgttgttacattttttgaaaacagggtttttgaaaatgcgatctaaaaattttagtaaaggtgtaataattacgaacattggattcggtgatccatttaggtgtaaattcatttctaggatcattaatgttgacaaaaggccttgccagatatggctctacgaaaatgtgtagaatcctaagaaagtacctgtttggagaacaaacttattaaaaccagagagcttatgagacaatctcatccacagtgatataaataaatgcaaaataccaataaataaaattacattatattacataacaattaaaaattatttctactttgtgggtgaaaccatgtactatgtgaataacactaatcgttatccttcgacttcttaacgtcatttataaaattttcagaatgtttcttcagaatttgttctcttctcagggccattctatctatagctgaaagttggtattgagacacacattcagggactcctttactgcgattcttatcactttcgtattctttcttcctcatttgatacaattcatattttttactggcgtttaacttagatttcaggtccttagttccaaacacttttttattaacttggtaccttatccttcttccaaatttgtcagttttagtcccccttgaacccctatttaccttttttctatcatatgagtcgtcactttctaccgattctacaatatcaaattaatattgaaagatattatgtatatcatatgttaatagaggtgtaccatcatccgatataaaatcttttaaatctggactttttttatccactttatctttagtttcattatttacacattcattttctaaaatttccaaagggttttcagaacccatttggataaaacattaatactatactagtatgaaaaatagtgctaaaatataacagaggttaaaaaattatgtttcagttgttgctgccttctttgcctttgctgccttccttgcaacacgtaacttgtgatatacattgacacttgtgtccttctcagttacttccctcgggggttccttaacgaattcttggacaacaggcataaccttcttaactgactgctttgtaagggccaatgtacgtagcttttctcttggggtatcagatggaaggcctgcaaaacccttcttggcgtgcttcttccttgggaacaagaccaacttggacaggtaagtcttaagcctgtttacgttaaggtttaagctctccgcgcacttgtttgttcttctgtggtctactgcgactcctacacttctggccaccttcttacccaagccagcaacctttaactcttgtagggtaaatccacgtccaaacctaagcttatagttgtaacgcctgctgggcatgtgaactagaggtcttagatatccagtgggtgttagccctgacgcagctgccttcctctgacgagcaagccttcttcttttctttttaccggcctggttcaaaacgggcttcacaaagcggtgactacatttcaccctgtgaacatccgataacatattattgtgcttcaccatctggaaattgatatatttttattttaactcaccttgatataaaatgtattatacaatcaaaaatgttcaacctataaataataatcagacaaaacaacaatagaatgattaataaaaatgtaaaatttgattaaaaaagaaaaaaagagtatttttatcaagataaaaccgtggaaggctgaataagtagatcgggcttggatatccacttaccgataaatcaataataaaaccgaaataataatataaaattatattaaagagagtatataaatatatacaggtgtttatttattctactgatttttgttcaatccattgtgttatgatagagatggggctttagcttttatggaaatactcagtaattatttccaattaatttttaacaccatatatacacttatattttttataattaaatcatattaatcaaaggtattgattttaaaccttatcctataaactagttagattcttttgtctataccctattaattttattttctttcctttggtccttacttacattatattgttataaatctttaatttattactttggatctaatttaatattttaggatggtatcgacttcatctaagaaccagaaggttcaaacattcggacgcaagaagcgcgctgtatgtgtcgctttatgtaccagcggcactggagtggtccgtgtaaatggaaggcctttggatttattagagccggttactctacgcacaaaggctcttgagtctctttatatagttggtaagaagcgcttgagcaagttggatctgaggctccgtgttcgtggtggtggttttacatctcaggtttacgcaatcaggcaggctatgtccaaggctgttgtcgcctattatcagaagtatgttgatgaggcctcaaagaagaagttggtggacgagctcgtcagctacgaccgttcactcttgatcgctgattctcgccgctgcgaaccaaagaaattcggaggtcctggcgctcgtgcacgttaccagaaatcttatcgttaatctctttataaattgtctaatatatatgtacatagaatttataatatatttagcgtattaaagagcgttggctcctgagatgatttctattagttccagggtgatcttggactgtcgggctctgttatactttagagttagtttactcagcatgtctgtggcgtttgaggatgcgttgtccatggctgacattctggcagattgctctgatgcaagagagtcaagcatacagccatagatacaggaggtcaaatagaactcgtaaaaatcaggataaaatttccctatatccggctcagtctcaaacacgtttaattctcgtttattcatctaaaaatcgttaaatcaaataaaccaaccagagagtattgtttccaagttaacacatccagcactttagtttcgtagcttattactgatttgaaatgattataaataattttaatattgtcatggttcccctaaaacatcaattaactgagaaaacgtacgttacgaagaagctctgcaatgtacgctgcttttgcatagttaaatggcgtcttggtaagctcagtgaatacgtttttgaacattttttgatagtttctctgaagggcgcttctcgccttctctccgataatatataaagaatacgctgacgactgtgagtcaacgttttgaagcaaattacgtgtagccttggcgactgaagagttaatgccaccacacaaacccttatctaaataaaatttatgaatgtataaatgcgtaggttacctgaggccattattaccagggctgtgtccttatggcccgtttctgtagttgagattggaagtaagttcaacacatcctaagaaagtgtaaagaacaaaaatgggcaaatattaaacaaacttgtgaaggttgagaaaaagggcgtcctatttcaagtcttctctgatcggctctaagctttgaggctgcaaccatcttcattgccttagtaatctacagccaaattaacagtttagttaaattaaccttctgaattgacttcacagatttaatccttgcggcaactgcctggatgtcaccgcttccaaaattacgggtctgtatacagtttaagtcattaaggccaagtttgttatagctgaaacaggtgttagaaattggcctaaatgtggaaagccccttagaaaagtaagacatatttgagcaaacaaaatgaaaagatgaaaaaatttgttacaaatgaagccgcaagaaaaatttaaaatggaatccaatatattctggagagacaaaacgtcattaaatacattatgaaattaaaaaacaattattcatttacaaataaataaaactaaaagttaattgtaaaaggttttacaatttttaatatgtatttttccataggttgatttgagtattggtgtaatgggtggggaataacatgttaataaaataaagttaataagtgttacatttgtattttaattatttcagataatttacacctctattggatgttatgggtgtaatatttgtttaaatatttggaatcttatccatattttatataacgttaattgtcatactcagacttaattaatattaaaatgtacatatataactgttttttacacctttaaaatggatcgaaacattggtgtgtctagtgacgagttagtttctactatacttttaaatcctatttctatattccataaattacctaatttaaactagtttaattaactttagtgttgtgaaattaattctgcaatatctgaaagaaaacaacttaaagaaaactctacttatgatgcaagaggagaccggagtttctttaaacagtgtttcaaacttggaagttttaatttctgacgcacaaatgggtagatggagtcaagttttagagacaatagacacaatgaaattatcgcaggatacattatttaagctatacgaccaggtatttcaatgttaattaaccttctttaagattgtgagggaactggttgatttgaaggaaaccaagctggcattacttttaatggagaactgtgctcccctggtttcaatgcaaaaaagtgaccctgacaactatagaagattgttggaattgtgcaagaacagaccaagtgattcaaaggaaatttacgcaggaatatcaactgacgcatctcaccaccatctgactaaagaaaggaaaagaaacattgtagcggaaggtttcagaaatattcattcatttccgtttagctctttctaaggatatagaacacgtaccacagtctagactacttgccttgttgggaatggcgctgaaatggcaaaatcatgtaggaatattaccccctggagagaaattcgacgtctttaaaaacatttctaaaatgtcagacgaagcacccgaatatgttaaaaacattagtaaaatcattaaggtacgagattatctcataataatgttgtagtttgccgagaattcacatcctgagtgtgtagtttttactccaaacggtcaatacttgatttctgggtaagttatttgagcaataaaagctgtagttcctcggatggatttatcgaagtttggaactggagtttgggagttttggatactgaattgtcataccaggcaaatgtaacttattattgctttatttaccatttaggaccatttcatgttacatgaaaccttaataacatgtttggcagttagtagagactcagaagttcttgcaagtggtgaccagaagggtaatataaaggtatttgtttcaagtttaatgtgatgcagatatggaaaattgatactggcgaatgcctaaaaaccatgaataattcacacaaaggaggttagttaatgaacatctaaacccttttagccgtaacatgcgccacattcagtagggattcatcctgtcttttgactgggtctttcgactcacttgcaaggttctatttcactattttatcacgaatctgtaggattcatgggctaaagtcgggaaagccactgaaggagtttagaggccatacatccatagtaaacacagtggtttattcaagtaaattaatgaacaaaatttgataatttagtggatggaactagagttatcacaggctcgagcgacggatttgtgaaggtctgggatacaaggacctgtgaatgcctaaaatcatttgcagccttcatacagcgcgaaaacgatgacagagacggccctttgatatcaaaatcagtcaacacaatactaaatttaagcacagcggtaatttgagaaatttaaaaaacattttagggtcaaagtgaaatgttcctggtgtgctcaaaatcgccagttctgaagctttttaacatgaacggaagttgttcaagggaatttacacacgaagatatcgaaaacgtttgcttcctggatgtttcaggtacccatcacggttattttatttgtttagtgtcgaagaaatttgaatggctttacgctctgggagatgatgatcaggtttattgcttcaacttcaaatcaggaagtttagataatgttctcaaggtaccttaaagttagatagcatttggtaggtccacgacaaggaggctattggtcttgtacatcacccatataactcattactggcatcttggggactagatcgcacaattaaaatattatgtccctaaatttaatgttttttaagtaattattttgacacaggattccctgatgtcgtgctcgccttatacacattttgtaatttttataatttagaattaaaaaacctatttttcgttatacattagtcttcttttgtatttttaacatattcttaattttttagctgttttaaccactataataccaaaaattttgcttttaatttaacttttaatccaacaaatatgaactaacagttatgaatcgcagtaaacatcatgatgcaacaattcctatcacagaaaagccaaaacaccaaaaaacttaacacgaaaaaagaatgtgtcaacttcattctacacttcttagcgtggaagggctataacgcctgctcagtcaatgatttgctgagatctccaccgctaaaggttctcttggacatttggaactttcttttcaggtatttaattaacaaatattaattattctaaggcttgtcgactctaatgtgagaataacgaaggagaacatggcagtcgaggttccaaaattttacaatgatttcggatacccacatataatgacaacatcgcacctaaaaactccaacagctgagcgtcagtgggagtcaaacttaatggcactctcatggctatgtaaattactattgtacgaacacgaggtttgtaaactgctgggtaagaattttatagaattttcacaaggattttgaaaagaaaaccaccatgacgcacacagatgagtacatgttcaacgaggcatcaaagatgaatattaagaaccctctaacgtacaaaacagtgacggaatgggcaacagcacatttacaattgtacattaacgtggttgagaagagaaaatcaattccgaacgactttgaggaggagttaaacagtgttttatcgaggctcgattcatcagttaactcgaaaatgaaacagctaaaccacctacgctcagtttcagaggaactccagaaagaaaatcaagaattcggtaaggctcactctaatgtaatgtctcagatgatctgaaggaaagagtaaatacaattaaaatagagatacaaacaatagatgaactcacaaataaagttaaggattactgcaaaagactggtaatttacaattctttaacaattttaaactttttagaaaaacgaacttgagttcagagaatcaattctggctcaggaaaccaacagtttgcttcaaatggaaaacagtaacaaggagtttaatgataaaatgaacttaacaatagttggttcgactctttataaaacaatttagaatggaaaaaacataaaggaaattaatcaagatataagcgagctaaagttgaagctgaataattgttcaaaggtttggtaaattcacaacaattaatttatagaaaatgagggaacttgagaacgatcgactttcgttatcttcggaagtatttgtttcttgatttaatgatctttagattactgcaaagagacaccaactttcaaaatgcctgacaacagtactgagttttatttttacccacttttaggccaccaaaaactataatcttatagtgaaatcgctatctgtagcaggaattgatgcagaaaattggaacgagtttgacaaattgattaaaaaagtcgaccctcactcactagaagactcggtattgttaaataatcttattttaattttagaaatcatttcctgatgagtgcttgaaactggctactgacattgtagttaacgaaaccttgacactgaagcatgttagtttaactaattttaatttaaatatctaggattctgagctatcacttcaaggaggaagtttgtctgatttgaagaagaccctgaaatcactagaacaagtaatgatgttagtttaatggaattgttaggaaattgaggatctaagaacaatggagtcagaattctctaattctacagcatttaataaggaaaaatcacacttaatttctgaaaacgagtacttagtctcggtacttctttaaactcataatttcttgattagatgataaagtcaaatgcgaaggaccaaatggttttaaaattaaagtttacatgtttttaggagttgactaagcgagagatggaaaacactaagaatgatctcgatttggcaaataaacgcttagtggaggcaagatctcaggccaattccagcctgcaaaagtacattaaagggctgagagatgtaagttattgactaaataatgtaaaataaaatgtaggttgttgagcaaatagaaaattacaagatgaagaactgtaatgcaatcagagagtgagttgttaaaatttaaaatgtaataggctaattgacttccaaagaaagtcagctgaggaggttctcgaaaccaaataatatcttttatttaaaatacacggattagttttaattttgttagcattagtttactcctctagatatattggatttggttcccaccagggcaagagacttaggatgaaggaaaagaaaacttggtacacaaacttctcaaagtaagttggcttctctctagtgttttcacattcacctggttgtgaaactggctgatttctttgagatagttggtgaccccgacggaacaaatcgatcctatctcttaatgacctgctactgccgcgtgttggggtctgatccgaggtttcgtttggagctcttgctaaacaaccattagtttattatatatatattaatgatatataatacctcgtaataatcggtcttgaaggaaggggaattgaactcttgaagtcgctggtctctggcggacagtacgtggagtctcctcttgatcctaaaacatattatctatattattcacttactgaaataattggtgcagtactgcttctagggggaacagcttggcctcgttcaggggttggcggcgttggaatatttgtaacagtatctggttgtggttgtggttgtggttgtggttgaggtgattgtgtttgatcttgaactggaacctgttgtcctagttgctgttgagcgttatctgaaaattattatttttgtgtaaattaataccttgattcagttgaattacgagaagaggctgaatattgtccatgaactgtagaaagtatctaacaacagtttgtgcattctggttgttcctcaaggtttgagagagacgtgccatcaaatcaaagaagcctaagcagtacagaatgtaaattactgtcgtgacgatgtaacagaagtaaggtagttttagaaggaatattatgagcattgccttgatgtaaaattctatgcgatatcttctccacagggttctcaaaagctaaatcatcattaaaaattaataaaattaccgaagtttcttgagtggatggctctgtagaaggcggtgttgaggtttgactaggtccagcatcctcctccaagggtgtgtttaaaaaagcgtcctttgatttcagtaattttttgtataatttgagctcttgaggtgtaggatcagtccctttaatctttttggaatctaacattcccttatatttttcaaggaatctgttttgcaaatcattgaacgtagacaaacatagcagaaataacattgacttgctttcatgattcaggccggaaagtttttctgaagattccaaaatttcctcttctttaagactaccagtgtggagtccctttttatctttatttaagagcggcttattcttggtggtatccattcttaatcattttcactaatatacaaaaaatagtttaattttaaaatatattaataatgattaaatttaaatttaggccgacatataaattaagtgaatttgattaattataaatattatttatgaaataatacataagttcaaccctaaatcaaccccccttaaaactcaacattaacatataaggtttcttaccttaatttttttgttttagttttatttgaattcgtttattaattctagtagtttaaacacagttttgttgtatttttgttttttctttactcttcagttttagttacacttctgaaatgttcatgtataataggagtagttctttcattttcaagaacctatctttcaaaagagtaaatttgtttaaaaacccgaagatttcttgcggaaataagtctttttactccaacattaccgataacaggctgaaaagttccttggaatccattaaatttaccagtaaaataaaaagtggccttatttttccaagatatgaccaaatcaacaattttttgaatagatataatatcgctctagtttcccaatccttgactttctcaactacttcctccaataccattgaacttacctcagatgatgaagtcccaggtttgtagctagccattggatttacacaattttcaacttcaaacactgtcattaataactttacagaaacgactgatgaggcaataccggtggagtcgaaagtttgtatatctgaaaccgaatgcagttctaaagacaatgcagatgtaatttgtaactttaaaggccatcctcaaataggaaaggagtacggatctgtgtataccaaacatgagcctacaatgtttggtgactggtcccacatgggtcgcgttactgacttttaattttatgcagtttataattatatatatttataaaattagttagtttaaaattttacaaatttatacagtagttttgaggttgtgtttattcgattcttgtagaattcaagctctagattaccaaaacattttatttcaaccaggaatgtagatgggaatagatcctctttgtcttcctaaaacactttcattttaagtttacttaccatgtgacgcattacagatatctggacataattgttagagccataatttatatgaaaaacttcactagaaacattttgttttttggataacctgaagtatattgatgagaatgttaaatacttgaagcccaaggacggtattacgtcaacgatatctgcatgcaccaacattgaattaacagtctttactgtcaaattatcaggatcagtcacgccaggaactccctcaatttcacgcagagtactaaacagataaatttaaggcttaaaaaaccatttctcaatcatgttgtacggttttatgtgaactaaaacctcatagtgttttatagtatcgtcgaaaaactctgatctgctgaaattaactaaaatgaaattattaaagtcattggatactattgtttgaagattgttgtttgtccttgacgaacagataacgaacgtattcgtgtgatgtgtgagcatcagagaggttctttagagtgtttataaaatcaaaatataggctagaactattgaattcaccttgagaatcagaaggttctaatcaaattagactaaaaaacaaacttactttcatctttgaaaattccatatttagtatattcattcaataaagtgccagaatctagagtgaaatgtttagagaatttgccaccagaaacatgtaataaactcagcagttcatcatcggagtttacttcgggttcatttcccatattttaaacaaagaaggtaggaaaatgtgtacaggattaaaatttatctaaaatgtgtgggatataaatttaaaaatattaaaaatagtaacagaatcaaaaggattattaattaaaatacagataagagtttaaatcacaaggaaataaagctttaaaactaagattaatggtaagaaagaaaagttattcctaaacactcctaaaagccttccttaaaagtatcacaaagaataaacccaaatagaagatacattaagcaaaccttaactgtataaagaataaaaaatttaattataacatctaaataaaagcagataaaagtagtttatatcatggggtgtaaaaaccattatttagtatcattcccaccgattttatattaattatttcataattctaaattagaattatctttttaaccaatctctggttattgttggagaaatatatttctgtttgttgtttccgtaacaagatgtacataagaccaataactctggtttacttttcttttttgtataccttttaaatttcaaattaattaatctttgttcgcatatgtccggtattaacttatccggattcctagtctgatataatatttaaatctatttcaaaactaattctcttttaagttttgtatttcatgaaattctggtaaatttctcaaaaataattatgaagtgttttgaggctcagtatatctaggatcctatttgatctaacagttttagagtcaatttgatacaaacatgtcgacggaatcactggtacttccctccctccatagaggagaagttcttctcacaccagaagacgcaatgaaacttaacaaggatttggaaaagtcaaattataggttcgaggttatttttgaggtctacaaccccccaaaaatacctccaaagaagccaaaatctgtggaactacaccttcgctctaaatcccattcacttggagatgaatacacgccctccagatcaacgaaaaagcgcattatctcgaaacaggaatcttctctaaggttcgactcttttggaaataactccggcgaatattttgaaaagaggtcctcaagaccgaggaaacagacgtttagtttcaccgatgatttgtatgatgaaccctctaatttcgcatattcagaaccctataagcctgaaaaatctaaaccaaataagacttcttcacaaaaatcatcacaaaaggacaataagcccgttaaaatcctctacagaacggtcccaatctcgacgaaacacctacctaaactacccaagaatacctgggaatactcctgttatcgcatcctccagatgatcaagtacatggacacagataagtggttttggtacccagtggatccagttgtggatggagtgccagactacttgactgtgattaagcgtccaatggattttcacacgattaccgagagattacacacaaagcactattcaagtccttacggctggcaaacagatatgcgtcaaatattttacaacgcgtttctgttttacccacccgaaaacatcatttgccaagcagctcggacactgtcactggctcttgagaataaacttaagtcgtccaggtacattaaccctgacgagttttacttaacattgtcaatggatccagccaagttgagagaggaaatagaaaatttatacgccccgaggagtaggaaagcctatgatgcgtgggtagcaccagttcaaacactggaagaccgaaggtctaaaaagagatttggacgtcttggaagattagatgaggataactacacagatctcgactctattgacacctcaggtgacttcacagacgacgacgagtacgtgaacttgaattcaaaatattccaaaaagaagacgattagaccagatagagggttgagacaagatagatcgagagctgagtcaggaatgagaagacggaaaccagctaaatttggagcaacaatgtttggttctgaagagatcccacagtatgggttagtaccccaaccaccaacaatacagaaaatgctaaatgataaaccactgacactttcacagcaaaaaacactccaggctaatatgttcagacttgcaccaaaccagcgcaaagcagccttagagctagtccaggatgagcttggcatcctggccgacaaccataaagacgatcctcagttctttttcgatacagatttgctatcaattgagaggcaaaagcagttcttcacgtacgtaaaccaaatggccaagactaacgtggaacacatgattaagagtgataaggcaaaggttgcaaagcaagcctcagacgttaggatcatgagcaggccagagaagttcagaaccccttcaggaatgttcagtgactcttcgagcacttcatcgatttctgacgtcgcttctaatttgctaagttctgatgatttctttagctcttcagattctgaaaatgaaattgttcctgaaaaacctgtcagaacagacagtcaaaaaggtatgtttgctttatttaaattaaaaatttatttagatactggattgcccgaatacttgcctgtggatgaatttgagggagataaacaccacctgagtgaaggaataatgggaaaccacgcggacttcctagggaagatcgaaacccccagcgagagtgacgtaagtttatataggaacctatctcttcagaacatgtcaaccagcggcaaaaaaactgcttggatggactggaagggccaggcgatacaccaccgcgacgtggctcagcagactggagtgcctcccagaaacgaggatgagcaaatcgcagagagttttgacgcaagaatctagtgtagaatttagtgtaaaaactagtataaaaatttactccttgtgttaatatgttaatctaactttatgtagtttaagaatgagattagaacattaaattagtttaataattaaaatttacaagttttgtactactgcttttctgttacgctctttatattcatcgagggcaatatcttcccaatctaaacaaggttatcgtgttaaaacataccgtcagaaacgttttcctcaaccagcttctttagtttggatattgatccggcagggtcaagtcctttgggacagactttagtgcagttgaggataccatggcatctataaagcttcatggtatcattcacttcaactaaacgttcagttgtatactcgtccctgctatcggcaatccatctgtaagcctaagaaatatatattttttggaaaaaaataaaattaaaaaacaaacctgcattagagcagctggtcccaagtaatgttcagggttccaccagtacgatggacaggatgtagaacagcaagcacagagaatacactaaaattatttttgtggataataaacaaaaacaaaatacctcgtaaagcccgtcaagcttctgtctgtcctctctggactggtaatactccttatctccctcctaaaaatcataaaacttcagaaagtacctttggagtcttcctcttcaaccagggctcaacgctcctgtactgttcatagaagttggtcagatccggaaccagatccttgagaacgtacatccctgggagtggctggatttccacagtacccatagaggcctgtttttctatatccatgaggcaggccaggccgttttctccattaatgttcattgcacagctgccgcaaatgccttctcgacagcttctgcggaatgtgagtgtactatcctgtaaaaatttaatgtgaataaaaatttaaataccatctcgttttttatctttattagagcgtcgaggatcatgggcccacactcgttagtgtcgacggtgtaggtttgcatcctcggcttctccttactgtttggagtgtacctgaagacggagaaattgacatttttggggctcaaaacaggcaatgttttgaaaatcacaccaaatctactagtagccattacattgttaaattatcacaaatgaagggaaaatatacaccacataatattctaaatcctgtaaatacttattaaattaaagaatcctcttaatgtgtttcattaaaactgtttagagtatattgagaatcggtttacccacgaatcaagatccttaactgagtaattcacgttcttcagtttccgtccctatgtttcataatctgggctaaaacttacaaattctgatatttcttcaacacctttattctgcgtatacgatgaacatattaaaacttcgttaatatcctaaataattattttttgttttgatcttgaacttacagtttccatcttcatgattcctataaatttaaacaccttctctaacctctctaatactgccttccttgtttccttacatcttgttagcatgtttaaaacaagaattccatgattttcagtcaacagctcactgattttattcaacacttcatcttctaggaacaacgggttcggtgacatcagggttccagattttaagttcttttcctccatcgaatcctctgtgttgtttatatccaaaatcacagctgaatactttctcggagtattacgagcatagctcagtgcatctcctttgatgtgtaaaaccctagaattattatttagtagttcagaattgagtgaatccttcaagtctagaacattttcaggcgagtatccaaagtacttctcagccacctccagaaccgcttcatctagctccacaacttctatattattatccacaaaatcacacagaatgtttgtcaatacccctgcacctataacagttctaattcaaatgattgttactaacctccacctaggatcagaatagcttcctcagacttgagaaatgccattgaaagtgttattgctatgtgatactcgttgttaaagtgattgaaaaggaactttggatttgaattttcttcgtagtatgttatttcagactgtataacttgtgggtttgacgagaagatcatctgtctagagtacaacttgttctcattatgcttacgatcttcattgtaaagatcacgaactatgattttcccgcaatgtctagatggtacttcacacacccatcttcttattttacatgactcgcccaccttcattatggtcacaccacttgctgagtctagcgagaagttatccagagcttcagtgagattactcttaatatactccatcacctggtcatcactgtatgattcaagtgggttaattttaagcaggtttgatatattcttcacgtacttaagccagattagcaagatcctactagcattagcgctttctgaaagctaaaaattattaaaacttactaaaactaacctcttggttcccctccactgatgaatacaaccacaggtgctcatgaccctaaaataatttaatacatattaatttaataaatagaagtgaactaaataacaatttataaattggcaaatggtgttaaataataccgctggaactataatacatgcattctcgcgtttgttcttcacttttgagtcgtagaccacaactgtgaaacaggtatcactttgattgcttgggaaaatatcaaaggcgagtcttcttcctggagtatgtttcttaattgtgggccccaaataaagcgccgtttttgccatttttaccttctctaaaattaattatacttatctaatctttcttacttaaaagttgtcctagttcaaagtactcacaaggcatattaggcatatctaccatcttgcattgctttctctcaattttgtctcctttatcaaacttgtatattgaatacatgaactggatcatgtgtgcctttctatcagattcactaaacagtgggtaaatatctatgaacaggtccttcattagcatgtttctgatcagctcagtaacaacatagtcctgtgatactgatatgattatgaaaacatcgtcgcagttcatcatgttcaatgtattttccaggtacgctttggatcttgatcttatcaattctcttgactcactatcatctattgatatgaatgcgtccataaaggccttatccactatgatttttggtatatttgggtattttttattcagcattactccgaaatcgatgtattcctttttcgaaacatcgacgtttaagaaaatgcccctaccattactcttagctttcatctcatctagcacttgttgtgagaagtcaaggttatacactgtcttgaacccatcctcaatgagtacttctgagaggttagaatttccacaacccacattgacaacgatcgagtccttgaaattttgttttgatacatttttagacaagcaatccctttctaatatacatttgtggaaaatcgggagtatgtttttgatgtctgtatacctaaaaattttgaaacatttaattaattaccattcaaagttttctagttttgggttactgtaaaactggttccaataagaggctgttctaaatgacgaaacgtttgttggaagtatatccatttctctatctaaggctttgtaaccaggagtccattatttgaatcaatgttgtggaacttgattggcaacctatctacaatcgctctcttgaacactggcaagttttttgcctccactaagcttatgcagattcccgggttccctgctcttcctattcttccgcttttgtgtatatatgtatcagagtctaagaatccatgtttaatatatatcacgtaccgtgcggtagatcgtagttaaccacatgggtgtaaccgctgaagtcaatgcctctagagttcagtctcgtcgatattaggatatcttttaccaatctagttgttttcttattaatattgtacaagtttgtgttatctatattagtttgaattacattgctgaacgccttccttctggttattctattttgtacgctgttcaacagctgtatcgatgcatccgtaaaaattcctcccaaatacttgaataaaaaatttgcagtgccctaaatgcaaatttaagtggaagatttaaataatttattaatctaaataggttcctaagattttattatctactccccatctaaaactaacatttgagtcacaaaataccaaaacagacttattatacgggactgattttaagattttcctcaataatgataatttagcgtcaggcactgtatatgttgccatggtgtgtaggatattttttgggaactgataggctgttttagattttacattctttttaggctcagactgttcagaaccacgagattctttattattttctaaattctttttattttcttcgtcttcttccacaaaaaacttccttaaaacatcaggcattgctcttatattatctgatgctgacacacacatgacatactttcttctcaaatttactaaatactcctttaattctctaccgaggtcttcttccttctcactctccaacccaatactcatgtttttgaacattttattaataagttcctttgttctaacatttttgatttttttatcagtttggcctaccatctccaggtaactatcgtattcgtcgaggaccacgtacctaaaatccttcaagttcaacagtttgtgctcgaatagaagtgagtacagacgacccggagttgcaaaatacatcgccactgttcttttcattgtgtttgaagtcggatcagagcctttggttaggagccttgaagctgccattttctgtattgaagtttttgccacttcgtattcttcagccttttcagccgttatcttctttatatttttcttctggtacaaaacgtttgcgtttcctattagtaatgtaggctttatttcagtttcgacattaattgtactgatctcatcactttctttatccttagaaggtattgctagaatttttgagaaatctgggtaaaaatcttcagggttaccttcactctttacagctttatactgctcatagatggtttttgctactttacaggactgaacacaaagttcaagtgaagggcatattaccaaaatatcttggtttatcaattccttgacagaacccaatatcgccttttggttgtaggttgaccaccctgaaaacagtggaactgactgatttaaacatgattgaaatattggaagcatatacattaatgttttcccagagcctgttgatgcatgaataaccctggttatcaaatttttgggcttttctgccgtcggtgtactcaaaatctcagttagtttaggtataaattttttctgtgcatacgtcggtttatcaattcctagcaatttcaatgtctcaattaacgcctcatcatatattcccaacgatttgaacggaaccttaacgaattcagagtctgaagtttcactaccaccaatcttacttgtgaaaagtgagttcatgtcaattatgccatcgtaacccaacttgatgagtgagtcaatttcctcgactggaacagttttcatggcgtcaggctctagtgctcttattcccggggcctttagtggtaacaaattcaactccttttcagatatttttgttctcttgtaaatcttcttctccacatcatcttgttccaaatcagttttctttacttctggagcttttttaggggtgattttcttcaaattgtcactactgtttgaatcgggtaacttggcaatcttttcaactttattatttttttctaacacttttggcggttctttaaagtattttacactgttcttctcggctctttttgccaactttttgatttttttactcgagtttatctgattactgtgttctattttcctcatcagtgggttatttttctcactaaaataccttcttgatgcatttatttccttaatcatcttaagttcatcctcatccttagcaaacaatgaatccaaatcatctttattctttcctatatttttcggtttcagatattttccagatttgttgcttggtactttatgttttgacttatccaaagatttacctctgtgtagtttagaatctgaatatttatcatttactttatgaatgtgtccataatctcttgatgtgccagaacagtttaaaaaacaccaacctttaaaatttccgttaaaataaacaaatattacggtcaataacaacctattcatcatatagaaatttatgcattcaatattcactttcgtgtattttagctgtcgatctcattttctttataaaagatctgttctttttgtaaaccattcttcgatactttgatttctccgacagctctctgtttctcattgactccttaaattgttcccgcttttcatccataatttccttgtcttttatctctttaagtttagcgattagtatttctgtagcttctatgcgattcaaaattaacgttctgtgctttttagtcttaatgttgattttaatacttcctgaggggtttgagtagtttaattgtacacaaattgcagatttattgattttttgacctccaggtccacttgcttttatgtatttctcttccaatttagagtttggctcagaaatttcaaacactttatttcttaatgcctttagttccaattccttatggtcttttgtgttatcgtaatagccagaattatgtgaatacaaccttccagatttgttaagatgtttgtaacttaaatctacgttaatattaaattgaggttaaatttaataaataacccagtgtgtaagtaaaaataccggctcttctatgagagaatggtgaagaataacgaacaaatggaagcattcgactatgattattagttataaaaccattcgaagtcaagaaggatagcaaaacaatcccataaacaggcaatttcatacaaatttagtaggattctataatttacaagatttgtatattcctatattcaaaaatattttatataaatattgttttgggttaaactattttacaagaattatacattaaaacccctaaaatctaattaaattccaatgtgtattgactttatggtgtattaatttacaattttaattattttaatctatatattaacacataaataaaatttggtttaattttttacttttaaaactcttttttattattatagttttgtatgtactatagatatgtcagactctgattctgatgttgataccaaggttaagagaaggaaaacagaatcatctggcgatgaagttagtcattcagatatcaaatcatttattatatatttatacatactagcacttaatgaattttaacttttaggattcttcatacggagatgttgaagctgactttcttttcaatgacccttctccagaggatttggatggaatttttacattaatgcagggaacaattaaatcacttgattggaacttaccaaagtccttaaataaggatttatacctctatttatctgagctggtatccaatcaacctaacattggaaccttaatcaaagtagaagatgaagaagattcttatgtaatggcagttttatcattattgaacttaaaacaatatgaaggattagatagtttcgtagaagcagttttgaagaaagcggaatctcactgtgacaaaaatgggcttaaaagtctcaaagatgttctatcagataaaaacaaccaagttggtttattaataaatgaaagaatgggcaacgttccatcacaattactgggaaaacttcacgaatgcgttaaggaagacattaagtggtccaaagaaaacgcagaggatgaagatgaaaagaaattctataattttacacacatcctgggattaagtagattatatacacaaaatcacaatgataagtcaaaagaagataatttagtttaccaaaagcctgaagaaaaatactattttgacaattcgttcgttaaattcatgtggcccacaggagaatccaatacagtaaaattttatgaagacgacaagaacaaaaagcctacttctaaggtgctacaagaatacatgtttgtttattgcttaaaatttgatcgatacaacttcgtggttaaggaaatcgcaaaaaactttaaagaatgaagttctcaaaacacaaatcataaatttaataaattaatatctttttatcctcatatttccctaaaaataattgatgagttaggtgttcattattggggcctggcatgattcctaaataatggataatattagtttacattttattattattgagtttagaagttatagattattttttaatgacattttttaattttatagtacacacctcaatgccattatcctttattatgtcttccctttcatttattcggtttccattattttttacgaacaatttacaaaaatttaaaatataatgaaaaatgggccacaattatattatggacccactttcagggaagaacaacttgattctaagtcagatgattccaacaacgacgatttgcacattttgaaagatgaagaatccgtggataacatcaacttccccgagctatcagttgaatccatagcgtctgaggaattaagaaacccagttttgaataaaatcagcgcttgcgacaccatagactccccaatcagactagatacggctgaacaaaaaccatacgggttttcttcactcaaaactgaaacatttgataataattttaaggatatacatagattgaaacgtaaacatgaattattggccttatctaagaggacattatacagcaagttgtatacaccaaagctggaagcgttacagaggcttgtagagcctgggaaatacttattaaacaatcatttttactacaaagataagaacttatctactagttcatttgctaactataaaagatgccttccaaataggttggattcaaataactcagagagtattacaaaaacggaggatatagaccctttatatacatttgattcgaggtcagacacagcatttgcaagttctaacagaaacttcccacctgacttcaactccaattttgacttcctagactttgacaaatttagcagagagtcaggagacgcatcgctttgtgacacagaatcgtataataagccacaacttgattcatttccagttgaaacatatactttgaatgaacatttgccaaggtctgaatataaagataattataaaagtatcacaaaacggcaagaatctgtagaaaagtcggatgtatctgataagccaaaacaacaagccccaaatgtcttaaccttgaaatcctgtgatgaatacgtaaatggaaagaaaaagaaaagagtacaaataccagtaaatgcctacaaatcaacgttatctggtgatggaacaatagataagtcacataaaatcgttttaaagtttgtgtcacacgattcggaagaatttcattatgagccgaaaaatctattagaacttatagaagaaagacttgaaagtatagcaaactcaacagagttatacggagataaaataattaaccctgaattcataattgaccagctagagtcacttcggccgccaaacatggatagagagttgtttttattgctatgccttaagccaattggcatgggatataatgaatattttaaaaattttagtgaaaatgactttacagaagtgttgaatcagctgtacagttttaatttactaaacactaacgccatgggatatgtactcgacgcagaatatgaaatacttaaagagttcaatagactgggaagaattcatcaaaagttgattaacgaggatatgatatactcaaagatcttggcaacgatgcaagaaaacttcatgtcgcaagcagaagatctcctaaagacaaccaggcaggatttgagattggaagtaggctactctcacctcaggtggggaagaatcaaaaacgtgctgtcctggaaaccaggtgacccaatactaagagagaagggattcgtacaggatatggcctcaaccatgaagatgaaaacattgcaaaggatggagcaagcttttggaacacaaagtgcgtcatccgcttattctccaagctcacaattaccggcgaatgaagcacactatatctactacatcaagacattgcaaagcctggaagagacggaacaagaaatgttacagttacaggtgtctagagacagaatgcaaacactatctgagttctcagtaagtataaaacttgataatttttaataggtgattgggccataccacaagccagagaattcacttccgtggaagtgcataggactctcgtgtaattcagtagtctggaaggtaattttcataaatcatttttacaaatttagatgtataatattgtcgagtgcacgcctatagtgtacaaattcagaacattgaacgacgtgacccctgaagtcacaacaaaaatcgaatgtttgtacaactcggttttggacaaattgaaagatttaaaactaaaattgccaaagagggttagtaaacagattgaaaaccttttttagagtcaaattatattctcaaactcagtaaaagtgcataacaactgtgtggttgagcaaatccagttcattaaacgtaagaaccatgtttaaataaatttaatgtttagattcgccattctcactcttgctggaaaagtcatcacagtttaattcgtcggagaggttaaggcaaacccaggtggtaatcagagaggttgtaagaatggttaattacatgaaggaccttaaattcattcttccactaaagtcaagtagaatttacttcaataatggaggagttatactatcaggaggagtaccgctggtttgtttttgtaaagataatagtgttatagtcacttctcggaagtgagggggtatcactgcttaaaaaacattctgttcaaacaatcgcaacgcttctttgggggaagaacattgaatggtatttttactttgcttgacccatgatgtaggtacctaccgccagagtctgaaggggacccatcctatacccaggatccattaatggtttctaaagcgcacacttggatgatagggaaactgttatatgaatcaatttgcctgtcaacaacaaataaacacgagttggactattctaagattgaattgtgcgaacatgaagatactagagagtttatgaagacatgcctggaacagaatccagacgatagaccaacaatagaggctttaatgacaatgccttacttaaagaaggttaaattgaactacggtatttacacatttatgatctcaattaaattcaggaactttcgttccgatggacgtaccgaaggtcagatgcgcagtggaattcctaggtgatatagagacgatagtgctgaataaaatgaggaaaacagaaaagggagtggcggactacgaacaatacgacgaaggcgaaattaagtttgtagaaagcaacggtaagtcactagggaaaatcattgaaatttagatgaaaatcttgttctcctcaacagtaacgataaatacttttatcacaagaatcttttaaacctttaaacataattttaaaaaataaaataagtaaatgtgtagataagttttgtatgttgtgcccatctccaaaatttattcacaatgtgtttatatgtaaaaataaaaatttaacctaaaatgtagtatatttaaatataaaaatgatacaccgtttaaatttgtcaaaattgtaataagaatgcccaaatggtcatattcaacaacaacaccgtccttagatggatggaagaatcaaaaatcacatcagtctcttggtgtcatggaagaatctttttaggaaataatctgggccagatattttcatttaaatctccttccataagtgtaagttacctctattcatcataacacatacatattcctggtcgttaacaattttgtacagacaatagtaaatactaatgaaaaaaacaagattacagtgtcaaaaagaccaatagttcacataagctcattggagcctagggaagaattactggcgcaggattctgaaggggatttgttcatcgtaaatatatttctgaaaacgaaaccagtgattttgtgcaggaaggcctcgtgctttacaagacaagccatagaagggtgcgaagaagtaagaagttccgacaaaatcttaccaataacgtatatggcgaacatatgtgtaggactaaaacagaagatacaaatatattcagcaataggagaaaatgtactgcaccagagagatatatctatatcagatgtaccgctgacaatctgctggttaaataacacaatagttatcggatcctcgacttgttactctatgactaatccagaaggaacagtttataccgagctttgtagaaatgacatttctacagatagaagattacaaaagccaaatacaacgaagaacataatcacgtgtacatgcatagataatgatgtaatgatagtctgtgataacataggagtgttttataatgcagaaattatgaacttgtcaaacaaaaacacgattcagtggactggaactctgcaatcattaggctcatgccctcccttcatagttggcctgacctctaaaaagaagttggaaatacacggaattagagatcaattgttgtacaagactctcgacctcacaacctcagcaattacctatttcatgccagataagtgtaattttttgtgcgcaacatcaacaattgtaacagcagttcaaccgtcaagttattatgaaaacatatcaaatttcctagaaaatgataaaattaaggaagcgctacaactcgtaaacctatatttctcacaaaatgatcctaggaaaaaatctgaaatagcaatatgccatacgatagcaggctggatatatttctctaaactgaacttcccgatagcatttttacatttttcatacgggaatgtagatatagtatatctgctgtcattctggaatcaatattacccactgcatgtgccagaaacttaccagtttaataaggaaatgccacagttcctgcatcatttgataccgaaaacgtcagttatagacaaatttatcgaaaataagatgaatgacccagagttcagcaagtacaaccagattgagaatacaaagaaggaattgttggaattggcaaatagttcgtttgcactgtttttatttaagaactcgaaagtaaaggagttggagagggacggagaaatggtagaattttacaagaagcttcaaacagcaatagaaacagtaacatttttgttgttttcagaatctgatgatttgagatacaaccatatactgagaaaagataaaaatagttcatttgtggatgttgacgcaacgaaaaatcatttaattgacatggataaaagtgatttgtatgctaaattgcttataagagatggacgtctaatagaagcgatgggagtactttcagaccttgtgacatcaagaaatgtgcactcacaacataacttggaagaaactactaatactccatgcatagagctggcttcatgcattaacctggttttagattcagtgggaaagaacaagaattcaggtattttatgttaaaatttgaaacaatttttagaactttcacctaatttcacaccggaagaagtaaaggagattctttacacctatttgcccctcctttttgaaagttcgccatcctcaggtacttgattaggtaataaatggtgttgtagcattgaatgtactgacaaagaaccacacaacacttcctctaaattctgacgaaattctatcgatgataaatgagcactgtaaaaaggtataatttaaataaagatataattaatatagagtacacatgggcatatggatatgcctcaactccaaataaagtatttagaggacctggtattgaagaataaatcaggaggggttcatgaaaatacattgttggtgaagtattacatacaatcacgtaagtttaacaagtttaactccttattagtttcctcaacacaaggtaatttcaacgttgacagtaagaaggggtttgaaagtcaaaatgataggaaacagacactgtttcagcttctggaggggaactatacatttgatttacctaaaatagaaaatatgatctgcagtctagatatgccagaagcaagagtgattttgtattcgaaactaggaaaacattatcaggcacttgaaaccatatataccaaatggaacacaaaccaagttaaattgtgtgaagcatactgtctatgttttggagatataactaaatttgaccagttgaacaaggataacccttacaagaggctgtttacgtactatgattattggattgagaaggctgaggagtggccgttgtcagatacaaatctctacatcataaaccaggaatcggagacttcaatcgataatttaataatgaatcttttgaaaattatagtttctcatactgaaacagagaataaaacaacgatcactaaacatttgatatcgaaatacatacacttctgcggccataattcagcactcaacggaacaagcatactggaagtaataccaggagattggaatttcaatgaatttgcaaacctatttaaccacttgcaactgagaatgctacacagtcagagaacaaagtcagtaaagaagggattagcaagatcgttacactcgaaaacatcaatgtcgctctataagttgacctcactacagccagtgaggatagatacaaatacactatgtatggtatgctcagaaccaataaaaataggaactagcatcgcaatcaagataccaccccaaaaggatgcctcagaatctaataattccatcagacagcctttcgtagttcacgagtattgcataaggaagggccatatgagctgaaaacaagttcatctaagtcagttaatgtactaaataaattttaaagtgaaaagttgcacataataggggataatcttaaaatgtgtatgagggaagggtagatttccccaacctaatttaagattcccgtgcaaatgtacaattcgatgatttaataaattatttcttacagaatgtaaaatgtatgatctaaatcattaatattttacccttcatcacaaatattttattctattttatgcaaaatttatcttttagtgcccccattcgataattgattttttgattctttttacttacacatacttgttttaacgtttaatttatccatgtaaattatagaggtaccattttctcgctttatttacccttaatcttttgtattctacatcactaacgctgatggaagacgtaaacctaaatgaccaagttatggtctatggtttcaaaggtgttgtaaaatatattggcaaaaaggagtatattaaaaggccgaatggaaatgtagtaaaccaactagtcggtgttgagcttgtaaaaaagttacctcagtgtactaatggaaatctcaatggaacaaatctgttcaaatctaatgatgaaactgccatattcatccctttagaatcattgaaaccctatgatggtacgtgatttcaagcaaaaattcataaatatttatcacttacacattttatttctagaattacttacacatttaatttttagaaaaggaagctgcctcaatcagaatacaggcgacagtgagaatgtttctagcaagggctaactatattaagaccatgtcgttccttttctggaaccatatggaaaacctacaggagttcagaacacttgaatctaaaaagtaaataagaaacaccaataatttaatttaggaatgttttattgcccattatcgaacgtttgaaataccattattcaaaaaaggattcttatctgatcaaatcaggaattctgagaagaagattttctgatcagactttcgagtttgaaaggaaaaattatccaccatcagattataacgggcctaaactgggtaaggttgtaaccctcaaatttgcccatgaattattggatatgtacaaatccggagctaacgtaagtttttcccaaactcaattgttcagatccaacttccaatcgactacgctcagaagattatgcttgatatgttaatgtggtatcagaataatgacgaaggtgttatcaaccacattgatatacctacacacgagaacagcaacctcatcatagtgggagaccttcacggccagctcaatgatttattatggatattttataaattcggaccgccatccaggagaaatgtatacttatttaacggggatattgcagatagaggcacctttgcgtccaatatatttctactcttgtttgcatttaaattggccgaacccacttctgtcataattaacaggggtaatcatgaatctgacgatatgaatgagacttacgggttcactagtgaggttaaattaaagtacgatgggcacatttacaatttattccagaaaattttttgggagctcccactagtcataatcatagagaagagaattatagttgttcatgggggacttttcagagagactaacgtaactttggatgaacttaatcgtgttaatcgtaagaggacttgtccagcaactcctgataaacgagaagatagcctaatgtttgatttgctatggtccgacccacaacgagcaaaaggaataagctcaagtagcaggggtgcaggctgcataagattcggtcccgacgtcacagaaaaattcctaaaactgaataatttggaaatttgtattagatcacaccaagtgcctgacactctcagaggtatagatattctccacaatgggaaatgtgttactttgttctcagcctctaactactgtcaaactacccacaacactggagctattgtaagttttacaaatattatgttgttttagttgattttcacacaaggtttaaagtttgaagcccacgaattcatatcaccctcacttgaatccatccactctctagagaatagtacaaacaaagtaacccaaaagctactggagtccagtgtctttggaaagatggaaattgatgtaagtcccattttccatattatgtttattaggaaaaaaacaaaaaaaggaaaccaatttcagaaaattgtaccaacgacgtgatgatgaaaatctgtgaactaatttgtgagcacaagcagaaattatggctgaactgctacaaacacgacaagaacaaaaatggaacaatttcagccgaggcctggaggtactttccaatcttttataaattttcaggaatgctctcgacgacttggccaagaccacaataccttcactcttcagcatcagtcagcttaatgctgtagatgaaaataccggtcttgtccactataacgaagtcttaaaaaacattgtcataggtttcgatcctgttagacacgaccatcagcacttgagaagagaatgcatttcacacgtacttttatttacacacttcaatattacttattaatactttcactcatgaattatgttaaaaattcttgtagatctttgacactatggttaaatcagacttgaacttgagggagttattgatgatttttgatagaaacttggacggatcagtttcatattctgagcttgacgacgccatcagaaagttaagcattggattatcatatccccagattaagattttaattagaaccatattctctagttgtctcgacggcactagtcagggcaaggctgacattgtagaattcttgagtaagctaaaggtaatatactcagcctcaatcaagtatcatccaactgaggaatggatggagaaagctcttccgtcgattggtcgtctgattttgtcaaacagagttgaatctgcccttaagtactgtaaccctaataataaagttgaaaatctggaacaagaaaggaaggagattaacaggagaaggtcctctgctatcagagcatttgcactctttcagaagttccaggagtatgataaggctggagaagggctactctcctatgatgacttcgtcaaggctttaaagtcactagatctctccaaagctgaagaggaaataggtgtacaactcactgaccatcatttgactgagttggccaggatgatagactttacaaactcacagaaaattaattacttggaattcctacaggcattctacgttgtcgatgagagcaaatactccgtagttgacgaggtatacaattatatatattgttttagatagaatttggcagtttcattacctatataactaattatataatattgtgtagatgtggaatcacatatgcgctacgatgtacaatcataaaaatagccttaaaagggcgtttagccattacgataaggaacacgtagggaaggtctacgtgaatgaattcaaagaagttctttacgtactgaatgagattctaggagggcaagagtaggtttattctcataacatctatttttagagcacctctaaccgtggaacaaaccgaggttttagtcgaatgtatagacactaatgaagagggaatgattctatacgacgagtttttggaatcatttaaaccaatgtacacattaaagaaataactttccaccataatttaccactacatttatgaaaatatgtgtttatttattatgtaagatggctcagcgttccgaaaaaaagcgtgcagatcgagaaaggaaagttggaagatattacacactagtttttttattttcagttgtaagttttcaccactaacacctattcaccctttctatctcaatttaactttcatactctagtaaactctttattttttaatttaatatttttaaatttcagattctttgggttcttaagtttgccagggacctttattacaaaaagctgccgtatacaaagtttgggtacttttggcgcgtttctctaatttttctcggatattcttttagtttgtatagtatttttaacaatttaaagcttggtttggagttcagtttatccaacgacctcttcattgtgacaacttctgccactgttctttctgttttctttgaccattcatataaactgtttctgacagttcctctttatgctgtgtataaaggctcaaaggctttctacaagtgggcaacaactccttctcttgaagttcctcagactcctcagaaccaagagcctaagaagcgagtaaaatacaggaccgtgagggcataaaatgtcagaagataactcggaaaattcggttggatcacctgaaggttccaaagagatgaattctacagaaaatcataaatctgctgaatgggaatctcaacctgattcccaaccgagatccaatgaaagtcagcccagcaattctgatcccgataaaagcgattcctctgacacaccaagtgtttatgataataaggaaaagggtaacgagttattttccaaaggtgacattgatggcgccattgagaagtggtctaagtccataaactcactttcttacattttaaacaagtccaaagctgagaataattctgttactgaggactccctgaccgagtacacaaaaatgtacgtcaccctatgttctaacctatcgttggcatttttgaaaaaagaagactttaccaagtgcaaggagtactgtcagtatgttttaatgtacgatgagaagaatctaaaggctcacttgaggattgtccaggctgatataaaactaaaaaaccttgataatgccttatcaaattgtgagaagggtttaaaactaaaccctgaagataacgagttaaaggggttgaaaaccgtcattaacgatcttttgaagaaacagaagaaggttgacgctgttttcgccaggaaagtttttaagaaaatcgagcctgaccctcggactgcgcctgacccatttgaggagctcaagaagaccaagttttaccgtatcaactatgctatctatatgatgtacttaaggctgttccttattattaaattcggctgggactacttcaagagaggtgtcttgttttctttcgactactattccaaggtcagctctcgtctcagacggttcttcagcaaatccaagcaagattagaagattattttattttattagaaatttgttaactctgcttctattttactatacttagtatgcatactatgtatgtttattttaatgaaattagagcacttcctcaccaacttcctggtgctgggtgtggaagatcggcatgaagtgttccctaattaaacacaagcgagacgtgtcggtatcgataaggacctaaaaagcttgaaaaacgagaaaatacccttgggaaaacggagccaagatcagttaaaaatgtgtccgaaactttgggtcccatcttgtgcacaaaatttctaacctaaaaaccgtggctaaaatttaactttcttactaatatttgaagttctgttctcatcgttatcagttctctttccgtttccctccaaatattaattctaaaaatcttgattttcaaaaaccctaccttcccatgattatcaatggaacgacgtgcagttgtcgtaacagtcttggaattttgcgtgcatactttaagttgactgaggaattattggaatgaattaaaaatttattaggtatatataaacgtatatatttatgtacaaatctacccatagttatatatctatatctatatctgtatatataaattaccataatataacattggaagaaatccaacacaacagaatattgaatatactgtacgcttgaaatcgctaaacaaccattattagtgtttcgctaaccgatagaaatagattcctataaaaagtcccaacgagaagttgaggagtgggacaactactaacagtacgaggcacttatagctgacaaatacgtcagttccaacaagttttacggaactgttttttagtgccttgactctgtgtctttccgccaaataattcgagaggaggtatagagggacccagagcggcgcaaatgacaaacctattatactgtagcaaattaggcgtatggtgtcctcaagaaatgacagaaacgctgaatacatcgactgctttagaagccagatttcatcgtcgtgtagatatccgttatctagtctctttttatacaatgaaagcttatcaactagctctagagtctctggactatctccatacttccagaataccttagaaataaactttctcaggtcaaacgctatgtttactggcacttttgacctttctggcgggtaaaggctctaaaaccaatttgttattattttaaacttactgcacacaaatctatccactgcttgactttaatatctggtgctgttatcatacaattattaatttcctaaaattttttaaaaattaatttaatacctgttctattttaccaagtagttttgtaaccactgaacgcctatctctttcaaactcagcgcattcttctctactgatctaaaaatgttaatttatagaaaacgtacactaataacgtttccgtagtatattgttgcatcggactggtccttctttacgttgttgtagaccaggccaactggtaggatgacaacatcttcagctccgtccaggatcgagaagaaagccattagagctattaattatctttagttaagtgtgcacttaccaacaccgggcttcaggggaagcaaattagttctgtcatgtgaaccaccctatagattatttaggctccatgtatataattggagatacctctgggaatataacgatagcgttcccatgttttaatgatgctgaaacctgttcgtaggtttcagactgatccatctttggaataacctgaaacacaaatagttcaggttgacttactgagaattgaactccatttctatctggacactccaactgtaatggagtctcgagctttagttgggtgtcactgataatctcagtaataacgattttttccaggtcaaattgaagtttatctcccaggtttaagtccaaagtgaattttgtatcttttccatgaattaaattcgttcccttcttccagtggatctttcccactcccgtatacttaaaatcatccggtctatacactgagatacaaccggccagagagcacaaagtccctattaaccttctttttaaagtctacactttattatgggtggtgaaacatacttttgcagctactaaaaagcacatttgccgtggaattgcatatattaaaagcgctgcgtccacaaactggttgttgtggttactaactacgataagtggcccgtacagaggcagcctttcctcgtggatgattgtgatattggtgaaaatggaagaaatcactactctaaacaaagtttaaacatatcagttatatttattaggtgtatgtgtaaatttatttcttagttacctgcagagccattttataaaaaggtaacagttgaaggccctcagttcataagggctgatattcattttgacttggtgtacggaatataagcacaagtcaagctatacgttttaaaaatttaaatttaatttcatagtttcataaaattgtgtattcaggttcaaatgatatgacgatgtacgaacttggtctcactgataaaaagagaagaatctacaggccgtataaagccaaacattcaaaataataaacatccagttactcttttagtaaataaagcgtaacggagaaaaaattacagattctagagaagataaccctaataatgaagaattattttctatttttaaagataaaacaaaaaaatcttaaaagaaaattataaatatgagaatcgcctaaaatgtgaaaagtatttttaaaatatatctaatgaacagatatttatctgttttatattaattgattctagttatgggatcagtggtgtcaattctgtaaaacatgaaactcccccaaaacagttaaatttatttttaaaaatgctgatttagcattatcttgttacacacaatgtattatattatccgtagaatacactttggatgttttcctggactacgattccaaccatgttcacttttcaattcctcctcatatcgcatccaaaacgtacacacttatcctggaatccgatatgacaagattccaaattatcataaagaggatctttcagatgaagatgatttgaatgatgtcagtcgactatcaattaagactctaccctttccttcctctgttaaagagaaactttttgcattaattaaatcaatatctaagaaaagggacattgacaatatcggatcatacatttcaaaaaagatggcttccagaacatgtgtagaacttcccaagattttaccttcaggttttacctctatactcactcactaacttatacctttatttaacttcctttagttttattggactctaacacacctgaaaataagtatttggaccaattgaagaacttatccaaagattctaagttcacacatctctacaaccttctaaacaagggatcgattggaccaaacgagcaggctcaaataaacttaagtgaagctgaagactcaaggcacaaggtatttacaatttaattaaaaaattttagaatagtaatataaactactcgccacaaatatcagttgcttacacagctcatactttttttggccattacgcagttttcctgaggatattccacgaggtagtcctaacatcaattattatttgttttagataaacaaaagagttgaaaatctaaaactgtctaagataatgttttacaaccctggccacggagcttctttgatgtatgtttctatttttcaaaattttagctcagcaaataccatttgggacctgaaatcttctgacattctagtagtcgaaccttcccagaaccttctgaagatttgccaacatctaacatcaggtaccagtttcgtttttagaattcttagaccttcttaacccaaggttccaaaatgatatatacgaaatcacagaacactttgatttgattgtccttccatatgtgttgtcaaatacccttggccataaggtaattcaatattaatataatttccgatagtcaaggagtcttttggtaaaaaatttatggaacagactgaatgttggaggaattatggtaatttaacaaactttaagttcgttttaggtggttgctgagcctggaactccaaccgggtttaggatgattcattccttgagggagttatttatatcgcagctccaggataaatcttttcatttcatagctccagttagttaacaacatttatacgtgattagtgtcctcacgaggggatttgccccttggcactgactggcaaggactggtgccacttctcccagagaatttacaggataccacactacatttacaataaggtttgaaatatttaataacattaaacttaaattagggctcaatttcaaagtctatagataacgaaaagttttcatatttagttattgggaaatataccggacccaggtttgctctctattatgctaattcatgctatcaagcaattaggtccaagtatccaaaggagtctttatcaatttcacctgctgaaaggtcatacttctggcctagaatcgtgatggtatttacatttacttttcagaaataatataaattcagcacccactcaaggttggccggagggtactgatcgatgtttgcagtagtcccaaccacttcaaaagacttgtaagtcacttcctccattaataccctactaatctatatagatactataaaacacttttttatttttataattgtttagattgttcccaagaatacaccagagtccagtggatacaagtaaattcttaccttaacaattattgttcttatagatatgcaagagatgcactttggggtgatttgtggcggtttgctcagagggtggagaagcctgtggccaggggttacacaccacccaaggtggtggattacctgcttagcgaatctgagagggagcagaaggtaggaaacttacaatattactttgagtagattaagagcaagattgaaaggactgaaatttcaataaaggacaaaatagagcaggacatgattcgaaactactcagcttaaactaatttaatagttgaaaatatattaaaattaaactgggtattaaaataatttaaagcgtttccaaaagttccaaaacacgagatgcggatttttctaaataacatttgttttgataactgagttacctgcgttaacccccttctcgaaggctaaaacctttccatcctttgaaaggaccaagtgggacctgtgcacaaatagaccaagttttctgcaatcaaggtggtctacgagcttcaattccttatctaccagtgttgtaaaactaagtttatgcttctcagtccacttcccctaagaaaaaattaccaatatttaactgagaattgtatttgaatataatatcgagtttactaacagctggagttctttctgagctagttagtccgtagacctcatagcccttatccttgaaagctttgtggttactggtaaagttacaagcctgttttgtacatcctggagttccagctgaagggaagagaaacagaactaagcccttgtagtctggaggcagttctccgagaagtttcttaagggttgttttttcgttcttatgtgtggtcaaagtttcactcaacgcttcagaggatagtgttttaccgactaaaataagttgaattaaagatacatacctaagggactctccgtaaccatgctctttagtggactgaggaaagagaaacttctgtgtaaaaaattcatacaataacagttatagattttcttatttaagtaaagacttattatcagtaaaagaatcccaaaatccatccaacaaattaatcggtgttggacctttgttaacctaacacaggagttctttcactattggatattcgtatcagtaaattaaccttttcactattttatatattataaatttattcagtttaaatagaaaaagggtccatatatacacattatgaggccatgaatcattaataaacataatccagaaataaaaataaccaagaattatatatttttaaaattttatattaaaaactaaaacatttaaaatactttgatagtgtgttttggaagtgttaaactagttggcgatatcgctttcaaaagcgcctaggtgatctgcgtttatagttgcgatggcaaaaaggtttgagttatcgtattttataccctggagcctcattcttacctcagattgaggttttatgcttatggttccatcagaataacagggatatgccgagtcactatcgtatacgaagttagggtgtatggaatttctagatacaaaggcctttaaaggccctgcctgagcaaaaaatccaagcttattaacatcagttacaatagcatccaacacctaaataacgtttattcacttaaattatgtttataaaaatattttgtaaaatatacatagtatatatgaagttttaaaaatattgtttataataatatttataagagtgatttaaataaggaatttatttttattacctcatctttgaatggtttgaaaacaatggcctggtatttgacgttaaccacaatcatagctgtaccatcctgaactcgtcccatatcattttgaactatacgaataacacaaaccacgtagccatatttgttagtacagtgaccttctacctggtccctaagcatttcctcaatgttttgctggtaattaggcccaagctgacaaggttttagattaatcaatttccattgctctacaacaaaatacatattaacagattaaagaagaaacaataattttagaagcaatgaaattataggtcatgtaatgatgaaattaaaacagaagtgtatagattacgatgttatgacaaattaattttaaaaaaggaatagattaaaaacaaactagtctacaacaatatattataattatattataaaattaaaacataaataaaataaaatatataataatctcagaccctatacggtatttccataccaaggaatcagtaattatgaaccttagttcaggaaaattaaaagtattaatcaggaaattttttacacctagcagaaagaaacatatacttccaactcctaagtatcctaagaaggtttggcacttatcgccttcaataactaaaaactatgacctgagcactgtggattccaagattatttccaagtattatactcctaattatctctaaatgtgtttatatacctatttgtatttatttaactcaaattattaataatttcataggtatattagagataaaaggcgatattagcccatttatgtatattatttttaatttctgccaatcttacacattattttaaatattatactatgtttcttcatgtttaattattttgttcatcccatccagtttatctaatacatactgtgaaattccccctgggtttacacactctgcaactgcttcgatttctatttttttccaaaggttattctcaacttcgtaccttaactcagggtttaaaattactctaggatctgattttagcctcttcaaaaccgatacctcatttggtgataaggttaagaagttcttcacatcgtacctcattacatcttcaatcttgataccaagccatctataccttgataccattgcaaatggattatttatattataacgataatcgcggtttgaatcaaaagaattcacttcattaatcaaccttgagtaattgatatacgatagtaatatcaatattccatgtgggtcataatctccaagataacaaatctagttacaaaatcactgtatgtataattactaacctcagaattacaattgtgtgatatcttattcagtagtgacctggtattgttgctgggaaatccgtttcctgtgatcatcaccagcggcaccttctaaaccaacatgaacaaactctatagtacctcccagatcctctgagagcacagttgaacaaatatcgagtatttctcaacaatgagaatgtaattgccatagacctcagaatctatttctagcatattcgacgatataccaattccataagctatgatcgtaatacaacacttaatatacacatagtatataactttaagtaagataattaatctaacgtctatttgaaatatctatttcttcatcaaaatggctaaactttattagtcctgctatactccctacaacatacataacagttattcagtgtttatattattattgtatatacatatgtatacagtacctctatctgtgatattaactccaaaattacttaaagaaagaccagtaatgtcggaaatgcactaaaaattcattttaacttttctttaaaacctgaagataatactttatttcagactgtcttttaatgaagtttcctaggttgtaaaataattctctctgcgtacaggtcctattctacctagaaatattttcacaattaagaaccttcttattcattatgtatatgtatttcatcaccacgaaaactaaaaaattctaatttcactgaatctaaaacctctagaaaaccatgttattacatttctaaagtttctaacacagtggaaccaggtctcggagtccgttgagtttgtttctggcaccaggcacttgatgaagtaaagcgtaaaattctctatatctaaaatttaagtccactttcacttactaagtaaaatactcatgtttgaaattattattaataatattatgtaaattgatgaaagttaaaaattaattcttacaagggaaaatttggaagaaaatacaaaacactccaagaaaaaggaataaatcattaaaaaatgattaaaaattaattcagtacagactggtttgtctcattatattgacaaaatcctccttcgaaactaaaggttattaatgttaagtatatactaactggctccgtctcgatcattatcaaactcctcaatcatggccctcagatcatcgtcggtcaaattgtgaccctataattaataataaactaattttaaacttacaagttccattgaaacccttttcaggtccttgaaaactatgttacctaaatttcattaatactcagtttaggacaattaagagtgtattaaaatctttatgagtatacctttgttgtcttcatcgaagagttcaaaggctctgttaatttcgtccattggatcacgttccgaaaacttcttaaccactaaaatgcgaataatataagtatgcgagtggaaactaacttatttctttaaaattttcaaagtctatataaccagtgttggttttgtcatatttctggatcaggtccaaaacctcctttttcttgacatcaaagccaagagctctcattgcaacctaaaatgtgtgttaaaagtatgaatataaatatatataatggtaataacgaaccttaagctcatggtagtcgattttaccggtgtttagggaatccaagagattgaaggcagccttgatctcctttagttgctcattactcagatcaaagcggccttttctgttattttgatgataagggaccttcgatggagtggtgtatgaaacttccgactttctgctgttcatttttaacaaatcaactaattaggacaggaaaatggtcatgaagagtgtaaaaaattaaaccatatgtataaaatatacaacaatttcaattttctggaaaaataatggtgataataaaattaaatatatttagtaaaacataataccacttccaacattacaccatacacactaaacaattaatcagattctgattatggacacttgaagaattcattaactttacattatttaattttaaaaattaatttttgaccaactttaatatcccgaaccactctataattaacctatctaatttattttttcatatacacatcaaaatttcaattctctcattttaagttaaccaaatattatttaatataaatatttttatctaaggtttcaatcttccataatttcttatttttatattattttgacccaggattccatccatacacaaatactttaaaccatattaaattggtagaacaaataaaaattagatagaagttaataaaaataattaaacaatgaatatatttaacataaattataatggaaatagtgataagttactcaatattcaagccgatcagtgaacctgaatgaattcaaaaaatattaaataaattatcttaaatggtaaaaattcttcttttttcagtggaaattgactctaattttatataatataagtatatgtgtaaaacgttaggttcaatataggttacactggggcctacgtcaacttgatcttttattttataacctgccacaaagtatttttatagaattattatacattcacagtaaaaaattctaatgcaatatttgtaaattatttataaaacaaatccatctgtaatttaacagttcgtttccttaatttaaaatatttcttttaattttaatgattctaattttaaatctgttttaatataaataattgttttataaaacacattctaaattcatttttaatagttttggaatttttaaatgaaaatttgacttaagttacaccatttgtcaaattttatcctttattctacacaaacatggtgatatagagtcaaacagaacttgaacactatttcactattagttttgttatttacaatctgttgatgagtgtttaagtttaaacaataaagttatttggcgaccatactgtacaaataaacacagtttgacttaaacgtaaagattgataataactatctagatattgatttgaaacacaatcaatactgaaattgatttgttagaatgaaaataggatacccaaaaggtgataactataagttggttttggcatcgcttcagccgtgccaaagggcctttatagagtgtttaacgacgtgttctgacgatgatctgttgatacacctaagggctttcacacaatgggtctgggaaaaggtgagtaatgaattcataatttatatttagagcgatgtaatttgctgggcgtcggttttgaataggttcgacgacatattctcccattatataaatctttcccggggttatataaaaggtaatgtaaacaatagaataaatattatttaggagagtgtgaaattgacccacaaagctactttaaggaggttgaactggtcaaaagtgcgctgaggacgtcgatcatgattgtggaaaattgtggttctaaaagcacgtataattctgttgacttgctcgtccacctccttgacgatttgaacctggaaattgtatatttatcaaccagaatgctctgtgtgtgtttcagcataaggaacttgagaaactcagttttgaaggagatacccctagtttcacagcgattgtcaacgtttgtcacaagcccactccctgacagagatttgaaggtgttatcgagtaaccccacgaatttgacgaggaagtttaaccagggcccagactcagagttctcagtgtcctgcccactggttctggagtattacataaaatgctaccaatactgggtatccagggactccacaatcaagctagaaatgtccaataaggcccacgaaaacgccaacgagtaccttgaaataccaatacacgaaattttaaaccctgagtctctatcgcagaacgaaagtaacgaaaagtttgtaaattatacctctaacgaaaagttcgttagccttgtaaatagttttgtctcctcaattgacgagaaccaactttacctccacattttaaagaccttcaagtacctcgtgtcgaagtatacaatcgatgaaaacaattataatgttagtttaaagtgttacactgttaataaatatttataggcacttcgatataaactcctaaagacattttctctgtattttgtacaattacaaagacttctagttaatacccgcttttcctctgtaagttttatcactatatatacataaatatatgcgttaatgaatttttagcttatttgtatgttgtttataaacacagcgttttacactcaatttctaactcaaaacccatgctttttactcgagttatcttggttcatcaaatgccacgagtatatcgactattccacaatggtattaatttgtttacataattttacaattaactttatcatattttataataactacaattaaccttataatatttcataatgactgtaaaaactgtataactgagtaaatgattggttttgtagatcgtggcaactgagttgttgtcggcaatgatatatgacgggatccaatataagactttgtcaaatttgctaggctttggagtcccgcaaggaatatacataaaggttctgaagagttatttacaccacgaacacgaatcacagcctctgccgccaatattgaagatgaagtcgccagggtcgtcagaggcaagtacggcaccatgtaaggattttgactacagaacgaaggatgaaaaggagatttgtatgttacagccgacgggctatgtatgcgagaatttagagggagacgtagactggaaatttttagtacagaaccctgaaacgagagaacagattttgcacgatgaggagcgaatgcgggttttgcttcagctcctagtagtttactactcaatcattaactatcacgggaactgtagcgctttaacgagcttgagcgtgcttgaaatgttggtgagatttacgaggtgtaggaatccaatatacaccccagtgataatatacgtggtacaagtgcttgaggctcttttggattataaccagactgtttcaagactactcagaacagaactacacttataccacgtttacatttcgagaatacaatttgacatgtgtaaagtggagaactcattacactttggaagtgacttgtgcaacaagaacagttggccaaatgggtggattttgccaagaacaaatgatgaactggtgctcagagtgtactggttatcctttagcgagtttagtgcccggaagtttctgttcaagagcataatcaaggacatatatttggtaacgaggccttattctggaagagctgagataaacgactacgatgtatttgcaccaacgagcccaatggtgccgatatttctggcaatacttaaggatccactgagctatggtcatggggtttacagcacagtgataagtctagttttggacactatcagagatgatccagtatctcaggaggaaatgcacaacctgggaattataccagggcttctgaattcgataaacgaagagactttgaagtctgaggatagtttgaacctggttccaacagcaatttcagacttgtttctacacaggacagcacaggattattataagagtatgaagtattcgtttgttcttagattgatagatgtcgtggtgaagcgcgactttgtgctatttcacatgtttggagaagtgtcagcatctattgggctttcactatgcacagtgataaaacaccacgaaacagcacactcactcttcatgaagaggttgattaaggttatctatgaccttttgctagaagcgctcacatttccagagtttaagcccgtttcaacacaggttagtcagagtgaaactgaggaatacttgaatcagtttaagacaaattcccctccaatggcattggaaacactatcactgcttgatgaggtaaaatcaagtgacttttatgcagacaggatagcaaatttgggcaaatgcctgtcaacgttcctatccctgaaacaaagcgtgtcgcagttcatctcctgtgacggaattaagttgttaatgcagttgtgtacagtaccctgtttaccgccaatgttcccacaaatttacccccaacacccattagtactaattatcaaatatctcacaacccaagcagcgatcccatcaataatacactttcacacaatatcacaacattatctcaatataagtgactcccatgacacctttattaattccaccgctagtaatagtgttaatcacactaacagtgtaaatcatgttaataatgttaataatgttgagaatgttgacagagttaataatttaaccaaaattgacaatttcaacactattagtagtgtggatagtggattaggtgaggattggaagaggctgtatatgacttatcactttttgtatttgatccacaaggacaacttcagtttgtaccacacgggatgctcaggatcatatcagttgagtgtggactttgagaatttgtcgacgtgtgagttacacaacacagtgacaatgtgtttgaacactctgatcaatgagtacccgagacttttattcaagttatcgagtaagattggggatgacaactgtttgatgggatcaagtagttacctgggccatgaacaccctcaacttagagcatataagcagtttacagcagataagaagaatgaacaaaacgatgtcattttctcagcaaatgacttgttctggtcaacccagtgttcctacgcatactcgacagatctcacgagtgaaaatggtgttaattctaaaatgcagttgttaaattctgaagagttgtttggattggagttttgtagatcgatggtagtgatgtcgaagtccctgttgctgtcgttgaacgtatcaattaacgaggcggtggggatgacaagtagcggaaacgagtgcctgaagacgtatatttgtaaacactcattccaagtagtgtctctgttcttcagcttgctacataacttggataacattaccacatcaaatggttctggtgggaatttggagtatttcaggaatattaggtacatttcagacgtgctggagttggtgtataagttgctgatagatgatagaacaagcgggttataccttttgacgacatgtttgttctcaagtagaggaggaatgacgcttgtttgcacctgttttgattatgtgttcacactatttatgggaatagtgtttgcaatggcgttgaagctgaataaggatttgacgatgaaggagttggtggggacgaagattgacttggggtcatttccaagaattaaggctctattgtcagattttacaaatttagagttttcagtattgaggaatttgtacaacccaacccttaaatgcctccaaatatgcctgtcactcttctccaagtgcactaacccaagaactgtccttaatactaacatagattcgaatatagctaacctgctgactaagtaccacaaatcgtatttcaccttctcagtaacggaaaaccagaatttagatgaaaagagtaatattggaacattggttaatgggatgatactgacatgtgtgaagtcgtgttggagttggtttgcatttttagtacacatggagccatgcacgccatcgtcaagcacctcaaatccattcttttacataccgacaaagattgtaaccttgttgttgaaggtgcacatttattacctggattacctatcaccgtcgaggcagcaggcgttgaatttacatttcgcaaactcagtaacctcttcgaaaacaaataaagttagcgacgctgtatcctcaggattgaatgtgtcgaggagatcaagagtgaggtcaagaatggtagtgtcaacaaccgacgatagctttgatgtgtatgaagaccgtgaccagcaggacattgagtcagtgaggtcatatttgtcagagatggggttcaacgagagggatattaacaacgcaatttcatactgtggaacatcagatattgcaaccctgacagactggctagttagtgtaggagaattaacgcctgagaacctggaactaacaaactattcccaaataccagaagacgaccacattaaccagaaaatactacagcacctaaactcatcatacctattacaccttaacaatgttgatttggacactaatatggatgctaataatgacatgaatatgaataatggcgctgataacttaaactcaagtttacaccctggtgataacgcacaattgaatgatttgcagttgaacagtgagcagctgaataggtatgaagatgtggattatgttaagttaatgaatgatgtgtttacggaattgaagactcagataataccatatatactgaagttggcacacctaatgccgacgtttttgcaaacggcatatgactcgatatttaagttacactccttcaagatcaggtttatgttgtgcgttgatagtttcgagggcgacgacgtgctgaagatgttccccaatttcgacagaaactacgaaactgactttaatgtgctgaatttgatgaatttcctcatgtccaaggtcataagactgcataaaatcctacagtcaaggtcactaaatgtgaagaatgagcatttgttgtcacttttcagcccgttaatcttcatctatgacaatgaaaagcaactggctttagaccaactatttgataaggagacaacgaattgtacaaacagtagtgaaaaactggacacaagtgaccagcaggatgatatgttgtataactatgtgcttgcaatagaacatgagcacttgttgtgctacttctatttattatcacatttgatggctgggaaggagaatctggtgcattttactacgaagctgagagattttaacacgggcagaccaataaatgtgctgaaccaggtgttggaggtggtggacttttttgttaatttaaggtcccagtgcttttcaaaggccattttgaatgtttcatctttgggattgaagaggaaatttggattgtcaattccagtaccagagtggtgtttgttgggagagtcagagtcgtggtttatgaagagagagtcaactgagaaatttgagttcaactctttaaagtacggtttgtatgcaacaaagtgtattccacagatatcatcaccgccgccgtttttcaagtatgcactcatttgtatacatgaaattgtcaagacaaggattattgaaggatttacaccccatgatcatatatacaacgcaccttcttcagcttcatttgaatccagtagctctcaacataatcagaaaggaagtccagggaggaatttgtttaacacaagcccaagtttttcatttgattctggcatttcacagtcagataaggctttacaaagtagtcagcagagtagttcagaactcagtaaacatagtcagagattaacacacagagattcaagcaaggatagcctgggtagagataaagagagtccgaataagttctataaggagacattgaaggtttacaaggagtatgagataccggaaatggttcaagagaagctgttgtacagctgtatgaagatcttggagatgttcccaggttcagatggagatgttaccttttcactcctgtcaatcctgaatacaattactgattcttacagaaacgcggagaagctcgtcagatttagggccacagtcaacaagtcaagtatggatttccttaaaattctgttaacgattccaaggtcaggcctgtgtccggggttactaagaatgatttcaaacataattctacacaccatggaagattacgcaacacttaaaatggccctcagaaataaaatcatacaaattctcaccccagtaaaattaatagttataataattatagatataatagtcatataataattatcactatacttattgttactattaacactacaacagttataaccaaatataaccattattatctttattaatgtaactaatttgttttatagggcccgttgagctttgatcgcttcgttgatgagttgaatgcatactacagaaagtgcccgtcgttgatgatacaactgattgattccctgtgcgttatcacagtggacgaagcgctgtatccaaacggtagttttaatcttccaaaattaacagaagatacagcaagtagttctaatttgccaagatttaatgcaaccaatgataatggacccggtggaagtttttcaagttcaaacacgattagtgaaaaggaagaaatggagaacacgttgattaactctgaaaataaagtatataaggtaaaggacctgtttattaccttgaagaaccaccatttgcttaaggatttagtatcatatgaagagtctgatttctcagtgtgtgatagttcagattataagctggatttgaggaagttgttccaaatattaagaacaattgttgagtttctgcatatttcatcaaatttacaagcattgacacattcaggaggtgattcaacactaaaacattcagattcttttggtaacacagtgaataatacagtgagtggtacagtgacccgttcagtgagtaacacattaaatagtacagtaactaacaatagtgtggataaaacggcgaataagatgtattacccatactcgctggatttgaacagctatttctttctgtttaacctgattaaccataacttcccactaccgctgatgtacccagagttgacaccgacattgccaggtgagattcacctgaagagcttcccatataagctggataagcttgacaagtttaatgttaggtcgctgttgatatatgtgacgaggtgtgtgtttgcaatgatatgcggactggtggtgccgagcaatttgtcagttgaggtctcagacccggattttgaaagagtacagaagatgatttcagactctttggataactattctacggccctgatgttgttttcgtcaaagaacgttgagacctgcacatgcgtggtggaggagattgcacacgtgttgcactacatctcaggactgaattctagtgatgcagggccgtactttgtgccgatagcagtttacacgctttgcaacctgctgaataacttgctgctgctgaggtttaggaagttttttgacatctcagaagtgatatcgaagctgaagagagtactatgtcaaattataggaagactcgagttatcaaggaatgagacgaggatagtgtgtttatccataacaagagttttggtgattttgacaacttcaggaacagcgtcatttggccacgcagtgaattcagacagaattaatgcatatggagaaataaacggagcgagagatttaagtgaaggtgaggaggacgaaacggcactagtggtggaactggaagacactgacgaagataatatggacatggactcgcatgagacagatactgaggaaactgacgagatggaagagagtgacgaaatagaggagagtgattcgggaacaaattcgggagatatgttaatagatgtggatagtagtggggaggaaagtggtgggtcatcagacagtgagaacccaatggatgatgtcgaggtttcagacgacgaagcaaatgaagaagtagcactaccacatgaagttgaagaggattacgcgtcaaatcagtattcagagactgtgacgacttcaagtattgaggatttggaggaggaagaggaagatgatgggcctagaatcagagtggcaggtgagatagatgaaacttcaagaaatgaaaatagtcaaactatcgatacgacaactaacatatcgataccagaagataatgagtccgactcaagtctagatgaattccctgctgatttcgatctaacaacagataatccaaatcccacggataccgctgttgctaatgccaataacattagcaataataatattagaattagtgatatagcaggagttcagagtggattagatggacattcaatacagattgaaatacagctaggaaataatcaaaatttaagtataatagatccttcaggctccttttttggactaactcagcaagttcaaggcactgctggtaatttcaataatccagcttcagacggttcatcaactgatagagtgttttcattcaatacttttggaaatattaatctaaacagtaataaccagagggatagtaatagttacagagtagatttgggaaatcagagaaatcaaggagttgaccagagagttgatcagaataccagaggtgatacgtggtcaactgctggtgatttagacttggtattgaaaaatccagtcttgcccccgtttaagaaatcatttaactccgaatcatatgacccaatatatccactgtatttgcttatactgaagaaactcaaaattgttaaagttaactctaatcaacctattgaacaacacgacactgcaattgatacagaaattgatgaacaacttgtggatcaggatgtagaggttgatgggcaactgctgcaacaagcctcagaaatcaaccaggaacgtatggatcaggatgtagaaattgatggaaaccaggacacagaggttactcaacaacaagatgggcaaaatattgaacgagaaatagattctgaaggaagatattataatagagggttagaagtaatagcacacgcgttgggaataacatatggtgacttgtttacattggcgaatatggacccaggagtgattgcagaattaccagaagatatgagagaagagatcatattacatcagcttaacacaattaacgtagacgcagtagcatccgtgagacagtcaagatcgtcatcttcatctgatagacctacaataccaccacaagtcgatggagagaatatgagagtggaaatgcagtacctggaatcattgcctagaagtttaagattagatgtaacgagagcactgtatggagagaactccagtgcagcaaacgagattaacgcatcacttgatctggaaggagaccactcaagtttattggcagcattgggaccatttatcaggtcagaaggacttaactcagtaaatgacctattgaataatctggcaacatcgttaagtcagaccacagatgataacttacatccagtactctttgaagctgtaagatcaagactccaaatactacccaatactaattcaaacaacactaacactggaaataactctcaaaacaccgctaatgccaattccagtaatagattcaccacttccagtattaatatcaataacactatacccaacttcgaatccagcttttttggaggtaatgggttcatagttccacttaatgacgagggagggataggtgaaccaccaataccaatatttagagacctaagtaggcggaatgctagaaatcagagggatagaaattttgttgaaggcgaggttggaaggacaggactaactctgggatttgtgataggagaagtatcaagacaaaacaatggtaaccgtggcagacttaaccgctcatcaatgggtgcacttaataggaatacaataagtttcataagtagaaacccgatgaacacggttaataggtcaggtttaaatgggattaatagaaatacaataaactcaattagtagggcagcactaaattccattaacagaaatgccctgaatgcggttaacaggtcaggtttaaatccagttagtagatcaacgataaacccaataaacagaggaggagttaatgggatgatcagaggtggtaggttggaattaacagacgagatgtttttgatgcctggaagagggattagaatgtcaagattgaatgaacctttgaaccagatatcaataacaggctctgaaggcttaggtttaggtttagactcggttgatgacaggaacagcttagacacaagattactgcagacaatcccccagattctcaactcaattgatccaaacatgtttgaattattcccacaaagagttaaccagactgaaaacaacgacgttttactaaatgaaaactgtgattcaattctggaaaacatcattaaactcatccccaagtccatatgctcctcatcacaaactaaaaatattaatactcaagtgggtggtccaacccacagtgctaataacagtgctgtaaacaataatgttagtgtcaatgttccaacaagtactaaccctccaaacgctactaccacaaataatgtgcaaatggataacgcaaacttagatcaggttgagaagagtattggtacgatggggtgtggaggtgatatggatacattgagtttagtgagtatttgtaaaatgttcttcttgccggtggagatgaataagaggattttcttcaagttgttgtataatgtgtcatctggaccgtcacaaggcgatttgatgaggatgctgctgtatatcttgagggaggcgattttaggagtggacgctgaatatgactgtccagacgtggatgaaacgtttttcaaaaacatgccgaaatcacacttttcacacctatcagacttggttaaccggaccaaagtaacattagaaccgagttactcaaatagcataatggcagtttttgaatcaaaggccacagttgactattataacttcagttatatatgttcagaacgagttttggaacaactcaggagtattctaatagcgttaccgacaacgataacctcactttcaagaccgatttcccattcagaggagtcatcagtacatgacctcaagaggaagaaaaagaggtttaacccgctattaagtgattcatcagatagtgctgaagggacatcagtggcagtttgtaacccaattgatttattgttttacgctacggctacgaatttgttccaatcgagtgtaaagcacatgaaccatttgctgatggtgatacacaacttgttagtgttcagagcaggagcaaacatgagtgacctcgatagcgagatattgtcaaatttagttaatactccaagagtcagtgaagacgtacattcagacattgtaaactcgctaagtgaagaggcattgggttcatttttgagaatttacacctcattcacgtgccagagcacctggttacagatgtgtaacaccaaggacgcaaacgcacagtcacagttggaagtcatatcacagatcatatcagtactcttgaaaagtaagcataagcagtttgtgattggagttttatccgaaaagtttcaactggtctcatcactgctgtctgagaggctatcaaatctgacagactcaatagtgtttgattaccaaattgagcccctaatacacacactgttaaggataacacagttgctaaacactgttaatattaatttcattaatgacagtgattttaccactaatcttactgctgaagttggtcccgaacatactcctgaagttagtgttaatgaggcacttggtggtgatgtcggtcccaatggtgctattgacggtgaacttagagctaatagtgctgttgaaggtgatgacattataaaacaaaacgatattgtggtttgtgaattcttcagagaaatgaattctggaatcctggaaattttgtggaataggctagaccagtgtttgatatacttgacggatgagagtttggtgaagaactttatgggcgacttttacaaggagacacatattgagaatcagcactacttcgacgtgctgagaagtctaattcccttgattgaggtctttttcatcatctcccagctgttcatagcgcatgattacggagttactgacatgaaatttgacaaaatcttggcaaacctcaattatgagcatttttacaattttcataatctgcgttccaactcatcaaacacaccgaacaagaaatcagcaaatgaaatcagcgagtctaatataggtaaaatgagtttatcggatattgggaagatgacacagtcaggagaactggggaaattaattcagtcaggagaaatggggaaactgagtaacctgggtgacgacgaagatatgatcgagataagtgagaatcatttattgatgatgaattttgtcgagaagcacaaacgactgttgaatttgttcataaaacaaactccgtcgctgctgaatggcacgtttatgccaatgataaggctggcaccgatgtgtttgagttttgacattaagcgccagtacttcaggcagaagctgaaagagggcagagtgggtcttagaatagacccgataaagatcaacgttagaagacagcacgtgtttctggatagttaccaccagctgaggctgaaaacaagtgacgagatgaagggcaagttgagtgtttcatttggaggggaagaaggtgttgatgctggtggacttactagggagtggtacacaattttatcaaaagagttctttaacccgaattatgcactatttactcgcgaaggaaggaaacaggagtttaatcatccaaacccactttcggcaattaacccagaccacctgaactacttcaagtttattggcagagttattgggaaggctttgtatgacggacaccacatggaggcgtacttttgcaggtcattttacaagcatatgcttggttcaaggataactccgtgtgatgctgagtctgtcgatccccagttctacaacaatctaattagcattaggaactgcagtttagagcaattaggtcttgaactgtattttagtactgaaattgacgagtttggcaaggtcaagatcatagatctggtaccaaacggcagaaatattctagttactgacgaaaacaagcacaagtacatccagctgctatgcagacacaaagtaacaaatggcattaaggaacaactcgacgctttcatgcagggcttcagggaactcattgcgcctgagcttattagcattttcgatgaccgggaactcgaactgctaatctcaggcattccgatcattgaccttgagaacatgaagcagaacgttgagtacatcaactacactgaggatagcctacagatcatttggctttgggaaatcctttccgagtttgaccagagtcatcttgctgcgtttttgcagtttgtcactggcaccagtagggtccccattggcggtttcaagaaccttatgggcatgaggggtcctcagaaaatctcaattcacaagacttttggacagaataggcttcccactgcccacacctgtttcaatcagctagatttgccttgctaccctgaaaaggacatgctcaagtctaagctcctccaagccattttagagggcaaggaggggtttggatttatgtaatctaatattctattctatactatatcctatgtagtttctatgtaatagtatttgagtagtgagtgtatataattctatgagctagtggtttatatttaccatacaataatataatgtagctgttacatgcctgactatacacatgaattatacaaaaattaactattctgttaaacataatacatacacaatacaaacataatcatacaatacataacactagatacactcaacccatcatagaatacaaaaatgactagttattcaatacataaaattacatatactcaatacattacataaatacaatacgctacacaaacagcccattatactaaaatgtaaagtggaaaaatgaaaagttaaatgtgttaaacaacaacgacaaaagaaaagtacaacaaaatccaaaaccaacaagtaaggttgtgataaacaggttggcggttgcagatgagcctagtcacggagtcaggtgatcagggccacatcaggcaacaacagtatagtaaaatagtctctttggttcaactcaatgttattcagtggggcagttactcgaatgagtggtggagatagatctcgtcgtcgttgatctggtcctctgtgactgagggcacgtctgtcgagagtgagcttggcgaggttgaaatgtgcgtgtcgtgttttaagccattcctgtacctcctcttctcaaccctcactgggtgatcttccatcgcgttattggtaacgaactcatggactgaattcaactgtgggtctcccagacgaaaatgtacattcaacggatcaattcctaagaaattattatacaccatgtaatagtgtagtaatagtgcagtagtggtgcaacaacagcattatagtattgtagtatattatactattaaatatattaaatatactattatactcttaattattgcataactaataggtgaattgttgtatgatttactgtttttgtcttactttgaacgaattgtgtggtgttgtcatcgtgtaggaattggttgttggcgttcattgcgagtgagcgagtgtaggtctcactgattgttgagatgaactcttctcttgagattatgtttgagagatcatttgagtctgggaccatcccgttatccccgcccacaaactccgctgagtgtgcaaatgagatgggaatgtgatcttgaacataaggatcgttatagctgtcgttaaaaccaccgaatccgtcataaacgtatccattccctatataatattaagtaatgattagggagtattttatctagtttaatgactaaacagtctcgtgtgttacgtatccccagataaagttattatttatatgaataattaaatctaaaattagtaaataattaaaggtaaaaataatagataattgtagacaaatttatccaattgtatttagaaataatagctaaataaagctaaatatgacaattaattaaatctaacaataaaatctaatcatagttagaattaattatagattataactcttaaataagagttaaatataaataaataggatacgtggaatgttattgatttgtggatttgggagtggatatttcatgggatcaggttttttattgttgaacgtgacttggaattcaccataaagtgacgggctgggcttgttagtacgcttgacattcccgaaaaactcgtgaatgaggagagcctcgtcgaaaacacccatgtcgtacgcaagttcccagagcatgttaatcttgaaaaatggcaaatttgagatggttgtgggcggatttttgcactggaaaacgcgcttgttcttcttgttggttttgtaggccatgcgcaaaagctggagcatgattttccggcccttggagccaagttgtaggcagaatccaggagcccagacgtacttcttcttagccttcgcaagaatcttcgccatctctgacttagattcacacttcgccccgtttttcttgaaaatgtcaatcagtgcatcttcgtcaattttgcactttagattctgctcaagaacgggattcttcttcacctcaggaacctcatcctccaaattcaggtaatctgacaaatcgtcaaagtaatccttgccaatacgcaactgatcctcggttcttggacgcaaatggtggccattgtgcaactggcgtctctttgttaattgctgcctattactcagttgaccattattaggatgtgcatttgtcacttgagttccattgagttgacggttattcaactcagatttctttgtcgaatgttgtttgacagaatactgattcttgttattggactgctgcctgttaccagcagtttgcctattattcaactgttgcttgttattggcattttgcctgttactgacgtgttgtctgttagtcagctgcctactagcaagctcaaaaccattcttcaaaggtttctccttatccatcatattcttctcaatcacagcattatccatcctcttgtgatcttgcaaaagcgtatcttgtaatatggtatcaagtaatgcggtatgatcgttgtgcagaacggcgtgatcatgtagatcattagtgattgcaaaggtatcagttgacagacggcgttgtgtttcctcagaaaaggggaattcggggatattctcctccaactctccctgaggcaagactcgatcatcgtactgaacgtcgtagtaattggttgagccgcgcaaacccgaggaagaaaagttctcaaatgacaaactctcctcgataaacattgcaaataaattattcaatatcaataccagtcagtttaataatttattcttctgcctgtgataaactatttccaccactaatccaacgatccaatcacaaatgggaagttttctcctacaattcaactttacaacagcgaataaaatatcttaatgggaaatccgattttttttcgagtagatgagttgaaaatctaaagtgttagacagtttttatgagatgatcatagatacagttgagtggtgatcaaaattggaagatccagtttataaaaattaaagtgttattaaatccgattaatttgaaaataaatccaaagaaacaaaaaagaataaatctgatctaaaaaaataaaatgtaaaatgggttgactgatcagagatttggtggtgttttggataatttccgccgaaatgtaaaattacatgaaaattacaaatgagaatgttaagaaaaaaataaaaaatcagcagtcgactaaaaaaatgcgcatttgaaacttggtgattctaccactaacaccacggtcagataatggatgaatgggctcgacaatgaaaaaacagaaaactgtcgagagaaacaaaaatgtttaaaatgttttaaagtcgattcggcaattttagcttgaattgtgagaagaggcgatgggaatagaaatttttgtgaaacttctgggaaaaatgagggttacttgaactaaaagttattatattaaatatttgattttggaagaaaattgtattaacaaaaaaagctaacaaatttaaaagaacagaaaggacttttgtcaagtttgttttaaatgagtcataacgatgttaggggctcccatgattcaggacaaagaattaaagtcacataattagtactgataactaaatcaagtggaaattatgcacttccaggaaaaaacaaacgaaaacatcaactgcgattccgtacttacaccataaattagacggtattggaatattgtgtgtattacctccaattatcatcaaaactacttaaatacactcacaccgagttcctcttctcgatttttttgaacgaaatcgttgtcagcaaattctaacagaatatccccaatctattcaacacccatcgtcacaacatttcactttattttttctcttcctcacacacattttgctaatatgcacctgaactactataattcacatatgactgggtagagatatattattgaagtggaaatattatggaattgagggttaaaattagtccaactggttgagaattggtttttccttttcttgggtgacggttccatctttggagaagagtgctctgttaatctcctaaagaaatatattacagtgtaataattgtttactcttcttctcttcgcggcagatttttcttgctgtagttttttctgcttcaaaattagtgctggaacgtggtggtgcctttgtatcctcttaatttcagggagcgccttgtacttctccatgagtttattacggtaatccaggcttcttctttctcttggaggtctcggacctagtggttcagatgcgtttgctttccaaatcctcacacacatgtctgagctgcccgaacacacaaattttccgtccagtgaaaacctgcaacacaagacgttttgcattctcctattcgagtagacgtccctgctacggccttccatagtaaataaccgtacgcatttgtcaaaagaactagctacaaattcactcccggtggggctgtagtcaacatcggtcctataatctattatgggtcattaaataacttacacggagtttacgaagtctttatggactaagagagccctttccagcttcctcatgtcaaaagtgtacaaattggagtcctcgtttgccactgtgaagtggattggattttggggattccagcacaaggcattcgatctcagccttaaaatgacctttcttatgggtgtattggcccttatatcatacaaccctaccgaattatccgcacccgtggatccaaccaaatttacctacaaatctctcaaccaaactcattaatcaaattataattttattttgagctatgctctaatcagtaccgttgtgggattaaacttgacgctataaagtgattggcatccccattcaaatttcatcactggaagacttctatttccatcccaaatatccaaaacatctcctgcagttgctaaacacatttatttcaacgtttccacttgcctatcaggttattggcccattggtggtcaagtccgttcaaaatacttccagctagaaacacattcgcagcctaaacaccacattaaaattatagatctaacttttgtgtcatttttatattgtgaaattatatcataatatgaattatcttcggattccacttcaatttcttccaaattcgccttgtcgggaacacgccagcattttaagtacttatcagtcccacaagaatataacaacgttccatcattatttacacataaccctaaaacatttttactaaaccacaatatccttaaatatgtattattaccatactattactatattatattatacaattaactatatactgataactatattctgttatgcctgaaagcggtaccattaacgaatccgtcatgcttccctagaactttccccttattcttctttagtaagttccacatccgaacttcacctttgcaacaaccggtaaacaaatcagcctaaaataacaatggaatgtaacatatagtaatgatattctatatactttatctatttatggtagtatatatatgtaataccagctgcgttctgctaactgccatagtattaacagagtctgtatgtccttctagtgctgaaataagtggtttagcaaacattttgctcaattttgtcgcgattagtgccctcgtgtactctctggcctaaagaattcattatttaagatgttaaattacccttgaaaaaggatgaagagccggatcagggttcctcataggcattggccgcctgtttgggccctcaggcacatagtcagatcttcttctatgcaaaacgcggacctccattaaaactaacggaatcaaacaaaaatcatgggcaaataaaataattaaattattttttcacaccaaattaaatttattcacagcgattttaatttatttacaacttgattaattagggaatttaatttaaagaaatcaactaatttacgagaatattatttgtttaaattatttaattaatttaataaaatttactttatttaaagagattaaaaaataaatatcttaattaataataaatgaatactgtaagggaagatttcaagtggaattaggtatgaatgggaattttagatgaatttgagggcaaattcctggattaaatattgttctgatttaaaccaataaaagaagataaaaatagccaaaatctctcaacactaactttttacatttcgctgctattatatacttccttcatatcagagagtgtaccaagtatagatttcggtatgacatcggaattctgctatctgtttaaattatttacataaatatggttggtaaaaaaataatttatctgagttttgtctttaaaaaataataaatgggtctggtaaaaagttgtgtgagtgttctgcattataaattgtaattccacatgtaaattcagggttgttgatgagcgaaatttactgagaatgctaagggataaattgggataaaagtgcgaagggtagatgtgaagaacgttaatacacccgtttgcatatacgggtattaattctgcataggattccaacatcggcgaggcattggtgcacggtgtataattaacattcaacacattttaagatttaattataatttattttccagatttaaccctagatttaactgcttcagaggcaattcgacacgaaggtgtaagtgacctgaatcgtaaccgaaacttattttttcatcttacacatcagatcaggatttcttattttaagtaaaaacaaacaaaattttatttgttctgaacttccaatttaattctttaactttctcaactgatttaactttattcactgatttaacctcatttgctttaatccagttatggtgttaaaaatgaactcagctttaatcttcttctttctctttttcaaggctgcagagtcgcataaataccgagttaactttctcggaccctcaaaaaagtcttctttcgtcgaaaaaagcaatgttgaaagtatttcattactcacactactactcatactaccactttatttactcaattattaatgggaaatacttagttatttccaccaaaacctacttataccacagtatttatgtaattattcacatatatagctgttaaatttgagtttagagttgactaaggtcttgagagaagacttgaattccaaggtcgacgaagttgttgatttgatagcaactgatttggaacgtgaattactgaaaaatggactaactaacctttctcttatgcaacaatccgacgtcaagggttttggtagtaaggcaaaggaaataattaagaaaacactggttggtgtcatgagatccttgcttccggtgtttgaaagatggatccacgactcagttcagcctccagttgtcgacaaacacgtctacggcgtcctgatccacccaattggctacagaatctgcgaacaaatccacgagaagctcaaaatcagtgagcctaacccatggaaggacgatgaaatagaagaagaggaggagccagaagaggagcaagatgaaggagattcagtatccgacgaggctattgatcaactcttaaccatgtaatctcatttatactcttttcacactatatacactgattttatccattgtagtgtagcattgtgtttataaccctaaatttaatatcacaaattttaattttattaattttaatatttgtaaaaagcaaataatatttgacaaaaaattttgaaacatttaaatttgtcaataatttgtatatcgcattagaatttgttagattataatgactactgcttcttgtgttttcgaggaccgtttcctcgtaaggtccattgacaattctaaatttgaacgtgtttcaagactaagtgctaaaagtaccggtttcgatgccgaattacttctcgatttcaattccgaccttcttcaagtttataataaacaagtaaacttatacctaatccaattttagctcaattttattcttaatttcacaattttttaacaaaattttaagttaattttaaaataattttcaggtattgcatattttaattacgaattcgcttctgcctagtggttctgatgtgaatttaagcgagtcagttgacattcccagtcttttgggcgactatgagtacgcaatgtacggtaaaatcttcaaatttgaagaagtttcttcagaaaccaggtactattaattatttatagtatttaacatctttttattatttataaatttataacctacacctaataaaccgtaaactagttataagtctacaaactctattaatgagtgattagaactatatatgcatcatttggcggtttactgatgtcgttaacagctgataaacaggttgtggcggaccttgatttggatatgaaaatatacctgttagtccgaagaatctcatctaatcgctaatatgccaatttaatgtatcttttaagtctacttactactcttataatagatgtaaatactatattaacatatattttgtcctttggactagattacggtgttaaaacctgacttaaccgttcttgaagataaggatggccatcttaccgaggtaaaagtagatgaagcactgcttctcgtgagtgacgtaggagccgaagttctttccgacaatgcaatgccatgttggctcgtaggtcttgtcgaactccttcttgatgtgtcctgcaatgtccttttctacctcgaactttgttatggcgtcaacggcaactttgagtgcgaaggtcttggtggtttcgtccatgtcgacgttcttgatgaccgcgtctgctacggtgggtttagcgtcgtttctgagtgttgccattttatttactttcggtgatttaatgtaggaatttatgttacaggtgattgtgtttgaaaagcgtgatgtgtagatattttacaggagctgaagtcggaaaattgaaaaatgttttttaaaaataaattattagtgaacgaaaaatttgtaatcgaatttttagatcttttcacgtctcgcaacatcaccactacacctacacatccatcaaccactcacatccataaatacggctctaaatttatcactaaataaatatatataaatatataaatatattagtatataaatgacgattatgttctccagtttccttcatcatcgcttggtgtttttacggattttttagagaagcttttgaaaagtttactcgttgtcttctttatatcgctgcgccaatttgagtcatctgtggtctgacggttaatctcctttactgctggcttatccgggtctccgtatgtagagtttgcgttttccaccttattgtcggccctggtcacttctgctcttgtcaaatctgagtcatttctggccaaatttctgttaaagggatcatgtctcgagaatcctgagcttccttgaccttgatgtgcgttgctatattctcttcttctattctggtttctctccatcaccgcgttatctctcatcacattatttcttacggttaaattatctctcattgaggtgtctcttactgatgcatctctgacagatgaatccctaattgacatatctcttaccgatgagttatttaaatctctggtcatgcctttttggtaatttctaccaacatctttatttacagagttactgaaaccatatcctgagttgactgtgactgtattattggttgctgcgagccttctttcaatttctaattgtttttgtctctgtatttcagcaatttcatctaatctttgcctatggagttcctgctctctcctctttctcaattcctcctccttacgcttctgttccaacctcaactcctcttctttacgtttttgctccagtctcaactgttcttccttacgtttctgctccaaccttaattgttcctggttatatctcattttagctctagctattttctcctcaaccagcatcttcttgaaacgtgcgttttgtgcgtcaaccttagactgatgttctttctttctggactggagttgcttctctacccactgctgtttttctgcttcaaaggacttgaataatattttttcttgcctcatcgcttctgcattctgcttatacttgtcttcacgacttttctgtacttctaacaataatgcggtatctctcttcaccagatcttccaaatatgcgtcatacaactgcttatctgcttccctaacggctctaagaaagtgttcaactttcctaacttcatttcttctctgcttctgaagttcctggcgttctctaaccatgtgttcttcctgagccttctcaaggtcttcacactccaacaagccttcaatcaggtcatctactgtaaactcgtccagacccttgccctttatataaatcttactacttgacgataaacataatttacggagctcctaaaaacatgttatacaaatgcaatagtatattaatgtggtaatagtatattataatattataagtatgcaatattgtatacaaaatactataaaattccaatattacatataattatactccaatacatattatctaataatatagaacagtgtataaaatacctgtaacatttgattggcgatatcgcttttgatcttatagcgttcgtcctttttgcgttggagttcaagttgtctgagggcttcttctcttctctccttttcagccttttcttcgttaattttctgctggagttcctgctttttcctctcctcctctacgcgcatctgctcctcctggtgctcctgcctacgctggtaaatctcgctcgtgcgcttcattagacgtgaacgctccttctcaattgagtttttcattgagacaagttgtagtctgcgttgttctgcactcttgttaacgtctgttgggctcaaaatcgtgatcgcgtagtacaaattcttacccaaatccgtcaactgatgtctgattgaggcaatagagtcagaattaactgacgaggagttaaagtagagaactttgttagtgtagtcaaaacgaacatgacacaaacctttgtggaccaactccactatctccttctctgcgtagtcccaagtgtaaaattcgggcggacaaatcgttttcgtaaagaaatcaatggtcattgatgcatacactttcgataatcgtgtcaaaactttatgaaacactacacttttaaccttttcataatacctagctaagtcctctttataagtgttgggcaaagtagtagtaggtttgttaggttcagcgccggttttagcttcatcagtttttgtttcaccttctttagagtctgttgaatctttctctacattatcactatttggttcattgagtattaaaacaagttgctggcatagtttcatggaattatcattttcaacaagatcatataacttttgtacatttttatgtgctagtggcagtacgtttttaagtgccaaagagtaatgtagtgtttccttagttggtatagtgttatatcctagaagagttgacattcttttctgcatttcatagactgcagttgaggaggcggttgatgaggacggactgagtgaatggtttgggactgaaagaacggctagaacacactttgagcatagatacgtaatttcctcctcagtgaccttcttcttatacatccgaatgtgcataacatagcgaagaactgcgagtgcgtggaatagtaacaggtctgagacccagaaaatcagggccagtttttcatagaaaattgcaagccactttagaagcttctccttctgctgaccaagtactgagactgagccctggaaagtcttggtaatgtaatctctaatacccaaagtgtacagatcttcaacagtgttaaaggcttctttccacatgcctagttcacaggccgatattagctgatttatcctggtctcaatatgaagttcaggctttagcatacactccatttcaggcttgttttgtacctttagtaagaatgcataatggcctcgcataacgtcgcaaaggcgcttaaactctaccaaacggctgttttctctgcaaaaagttattgccttccttgcagtctcgtggtaaaccttctcgagcttaggtgtagctctagttatgtccaggatcatcttgtaaatctcccacaggaagcggtacacgtcgtgaagtgttttactgtgagggtccctcatctcgacttgcaaagtgcttgccatcaaaccctcaggagtctcgtcatattccatgccgtcctccactattccactggtaaactgtgttggtgactttccggtgtaagaggctggcaactttgactttacgtttacaagtctgctttcggccctatccagcaactccactataaccttgcccaaagaggccacgttagcatgctgcgatatcagacggtactgatgtagtccatctctagccatcctgagtttgtcctggtctatacacagcgcaacatactcaagcatgatttgctcctggaccatatcccagccctggatgcggaaaaacctgtggccgattgctgagtgtaaaatcaccaacgcctcatcactctggcctatcgcacgcagctctgccgcccttttcagggcattttctggcttctggaaattatgcatcttttaacataatcataatctattcactatcctgttttcacttatactatccaaatattggttagtattatgaagcagttttataatataatcagatttttgagttattgtaaaaaagtagacgatttttaaaaagttggaattagagaaaataatcctggattgaaaaataatctgaaaatcgggaataaaacttgaaaaagaagaatataattcaaaaatgtatagattcctttgttaaaatacaaaattaataatacgatgtgataaatttctgagtcaaccttccacgattgtattacagcgtaaacactggaatttatccttaactttattagcttatcttatataatttttagtttagaggtagaaaatccacaataaaaataattcaaatgtggattcctttgaaaaagggtttgtaatttatcgactctgattgggttaaatggggactggctcttttgtatatattataaaaactccaatcgttctatattactcacacattatagaacatattcttccaactagacattggtttcctctttttttaattaaaattaatttaatcccttttgccttttacttttaacactaaaattatcaattgttttctttttacatttttgattatcaccatactaattatcctaacttatacactctattactatctattacaccaaacaaattgatatatatttagcaacataccacagaattaacaatgaaatgtcataacctcctgggtgtttgtgtaatttcaggataattttcatagctttatttaacatataattttttattaatgtttattatgatttatttgtagaatgttttgtttacatttcatatcttcccaatttatgtcacgagttgatttgacatatttacactatttattaattttaacaaatcgcatttttatttataatagttttgaataatagtgaaaatggttggagacgaggattttcccagatctgatttgaaagatggagttaaaactttggatataaaaaagaagtcacttttatccaaattccaaaagaataaaaccaacaaaccatctaagaaagatgaagaagatattagtgaggggatttttggctcaaactgctcagatgatgtaaaattacccactttggattcctttactcccgggacacttgttttgggctctgtagccttagtttgtccctatggtctaaggattcacctacttaataatattgttggttttgctaaatacactgatctttttgattcagctgattctagttcaaacaacagtaatttgggtcatgatcgtgataataagttaaattctcccttcaaagtcggctccacagtaatttgttacgttttaaaggttaattacagttatttatcacttagtctaaagccttctcttatcaatagggatttgagggttgataatatgtacccagggctggttttaccggcaaccgtagtatcacaagaagatcacggcctttcaattaaatttaacacattaagcaccttgaatgggttcgtaaagtacgatgagcaaggtagagaatcggttaaaaatattttgaagacgaattatcccataaactcgactgtgtatgtatcagtggtgacagtaaacagtgaaagggaatttgttaagtgtcagtggccctggcattacaagaccccagctaacactgatactagtctagtgtttgatatgctaaaaccaggacttctattaacagcagaagttttaaatgtccacagtttaccattagaggcatccaacaagtccatttttgcaggttacactgtcaaatgcctcggatcaattaaggccccaatatcttcattacactcaatcactcacgatattctctcaaatgaagttgaaatggaagatttgtatagtttggtaggggaaatggtagagtgtaggataatatacgtagattttgaaagtaaaaaactctacctctcaatgcaatcccagatacttagatggagaggaccgttaggtcaagcctttaaacctatccctaacaagattatcaaatgtaaaatcatacaatgcttcagctctggatttttactggaatctattcctcccgctggtgacgatattaataacgcagataagagagttttacactgttattgcgctattggtgatgtgttggatgataaatcattgacagaggaaacaatattttcgtcgaacaaatattctgtaggatcagagcatgagtgcagagtgatagaatttgaccactttacaaggctaactagggtatcgttgaagagttcactgattagcgaagactatgtgactccatttgaattgtcagcttcagacattgtgacgggcaaaattataaaccttgtcaataccggtgcgatagtacagatttcaagtttagtattcggaaaagtacctctcggtcacctcactcaatttcctgtgtcgaaattaccagaaggttttaaggtaggaaagaatcttaagctcagagtacttaagttcgaccacccacataataaacttattctaacagctaaatggctgatggtggatgacacagatcctgtggttaaatttgaccaactacacgttggaaaacaattaataggatacgtgaccacctcaaacgatacattatatacaatcagtcacttggattctgaatctacacattcagatgaacttggagatctaaaagatactaaaagtcagcaaaagatttatgtaaaattctataatgagttgaaaacagtgttgagttcagaggaagtgaagaaggcgaaggagttatctgttgatttaaaaacagactcggttgtaaaatgtgcagttacgagagttgatagagataagaaggtcttttcagtgaccatagatgagataaaaatatcaaaattacttgaaaacaaggataccactaagaaaccgaggcgagaaaagagaaaactactctgtaaagaaattttcaaggattataaaactaaaaagaaactcaagactaaataattcttacttttatattacataactacatacactatcattaatttacactgttttgattagttgtgtagcaggtttattaataatttatttaatatttattattttttaaatcgcaaaaagttttaaaaatgggtgatgaaaaccctttaatcgcagtaaaaaatgatcataaaggtaaaaattcgggtcgaaataaaatgaaaaataaaattcccgaccgaaataaaaaaataaataaaaaatcgcaattaaacggaaagaatccaaatttatcaaatgaaaaagttaataataaggaggaaaaggatggtaaacctaggaataaaaaggacaaaaagggaattaacctgaatatcgactcaaaattagaggtaaatactatttatatgaaataaattaattttagtatgaaaatgagattaaaatccgtgaattggaggatcgaatcgcagataaggagtggatgaggaatcccaactctgtaatggatttcgaaagactagtggtaacaaatgcacgttcctcagccgtgtggatagcatatatggccttttacattaactcaggtgatatagaaatggccagaaaaactgttaaaagaggacttaaggccatagatttcagggaaatggttgagaaaatgaacctttgggttgcatatctaaacatggaatgtatatacggaaataacgttatggagatattcaatcagtaacttttatttcaaagttatatacactgtaattatagttattctataattttttagggcaacccagtataatgatagtaaatcaattcacctgaagatgataaacattttcgttaataataatcagcttgataaggccaaggagatttgcgaaaaggcaataaaaaaatttcacaagtccaaaaaggttttagtttgagcattttaataacatattgtaggtttggttggcttaccttagattattgtatgagaatatgaaggattttgaagctggaaggcaactccataaaacatgtatcactagaatacctgaaaagaagagaattaatatcacatcatcaacagccttattagaatacaaacacggatctccagaaatgtaagtcaaattacgcttcaaccaacattatatacgatcaaatacactataacagttgatttaggggtaagatgtactttgagaatatattattggataatcctaaacgaatggatatatggaaccaatatttgacggcacatattaagttaaatatggacgaatccaaaacacagaaatctgaaggcttaaagaacgttagaaacctgttcgacagagcaattacccttgaccttaagccaaaaaagatgaaaatcatattctcaaagtattttacattcaatttattttacacattgtaattggttaaggatatagtaatcttgtatttaggtggttggaatttgaatgtgcatacggaaccgagaaatccaaggaatccgtacagaaaaaagctctaaaatatgtagaatatatcgaaaaaaagttaagtaactgaaataattttttaacaccataattcatcaatattcacataagcttattatttacactattattcctggttttagtatacatattttaattaatgggattagataaattttatcgcatgtttaaattaatataagtctgttagtttgtagaaatgtcggttactgggccggctgcaaacaccaatgccattcaccgtttatcagagcttgagctcaaaaaaggaatcatcggagaaggctcctggcacaaccagtataaagattcttgttacattttcataggtatttgaccacttagttataataattcaattttaggaggtttggaccatagaatgacggaaggtgatattatcatagttttttcacagtttggtgaaccaatcgatattaatttaaagagagataaagacactggtaatacatattttaatattaataattattaatatctaattgataaaagtcgtgtaatttacttaactgtaggaaagtcactcgggtactgttttctaggttataaggatcagagaagcactatactggctgtggataactttaatggttcaacactcctaggaagaaggatcagagttgaccatgtgatggactactcagcacctgttgtttacgatgataaggttttatttacactaattattcttatataagtgtcttataaatttattctaggttgatgacgaaggtaacaagatacgtaaagagtataaacccactggagcagaaggtttaggactgggaaagtattatgttactgaaacagagcggcttctaagggaaacttccagcaaaactgcaaaacatgaacccgttcaacaaatggatgaagatgaaaaatgggctctagaattcgaacaaatgattaaaaaagaaaatttagaatcagatgatcaccctaaagaaaacaaagaagatactgtaagtgttaaaaaggaggataaagagagagataagcataggagtcgtggtaagagtagaagtcgtagtagggatagaagtagaaataggtatagaagccgtagtagagaaagagacagacatagacacagagatagagatagatataggagtagtgatagggatagaaggagatatagtagaagttcttccaggcataaatatcgaagagatcgacacagacgaagtcgtagaagtagttcttaaaatctaataaattttacattttaaacttttaatcgtaatttaataaacatttaaaaaaccatcctaaacattattaatgttattattttacgaattccacccgttatttggtaaatgcataagggtttatttaacagcccaaaatatgattaaaattggagaattattaaaatatattatagaaaataataaaaattttgaaataaaaggggttttagacagttttgatgttataggccataaatcataacatgtgccagaaggtgcacacaattcatgaatctgggcaaatgcaattcaaaaagtaaagagaaaattaattcctactcttaaatattagtagggttaaccttctttacaattatctgaaaattatggtgaaactgtgaatatttgtgaaacatacagtttttactctacacatttctgttttttccagttttttgtaattttttaaccttaaaaattttcaatgttttattgttaattattttagcctgaattttgcgatttttggattttttaattttctcatttaccttactagacaattttggataatttactatcttttaaaataaaataatggcagtatatggatttaattcaccgaatgtgcaaggtgtaagtacacctttatctggtttgtctcattcgcccctgtctgctaggcaacaatcacctgttactagttacgttgttccaggtggttcacctgttaaggttgtctcaagccctaacgtatcaaaaagtgtagggtctggattttcacaaacctcgggtgttttaccccaaaattcacaggaaacgagggaaatttcaacagtttatctacctccaatacggtacagatatgacaatgtcacaggtactttggtccaggttagtgatcaatcacagaatgctaactttccaagtggctccaatgtacagtcaccttctggaccatttccacctaactttagtcctccactcagttcattctcgcccacatttaacagtaatttatcgcatttcctcaattccaatccgttaaatcagacaaaccagtttaattttcagaatcagctaaaccagatgaatgggcaaaaaggtatgaattcatttttgaatcaacctatgggtggtccaaatagagtcccaacaccaagaaatgaagcctttaaatttccaaacttctcacctccaaatttcaacaaaccggttcaaactcagtttagtcaacctagtgggcctcaatttaacagttttcaaccaagtggaagccagtttgaccctggactatttaataattctcagtttagtggagcacagtttaagcccccctttcaaaattcacctcagtttaaccaaccagctggaccacaattcaatcagcctccaagtggtctatttggaaactacaaccactcagttcccacctttgggaatgtccaaaatccattgaataccaggacacccggtgggggtaacttccaccgatatggaaatcacttgtacatggatactccaagagctagatacgaagcggctgtcaaggattactatgacaggatgaataattataacagttatccaacttttggaggctataatcctaatcctggaggttttaaccctaacttaaatgggtttaatcctaattttaacagccaagggtataacgggtttaccccgaataacttcaatgggacggagaatagtcctattggattttcaaaggcgttttcaaagtttgaggacgttgctacgaagttgttcacaaacagtgattcgttagtttccgacatcaaaaacgcagcgtttaagatttttaacgcaaactcgccagattacatgagggcggtagtatttaagctggatagacttgaaaacgtccctgttaacccaaattctgtttcaaagctaaccttcagtgttgtggcttattttgatgttgatactgagaactacaacatacataaatcagaacaacagtgggcactacccacggagactcaagggcttgtaaactgcgatttaaaaggggaatctattaaaattccctggaaaggagaggaatttgtgtttctaaaaatactggaacatgttggatacaacagatttgtgttaggaagattacaactcaaactcgatactctggttactgggcaccccttgaaggttacaataattggagatgacggaaagaataaaggctcagcaatactggaatttggaattggagcagtctcacttgaagaatttaaccagatgaatatgcagtccaacaacaccaacggggattacactccaatgcataatatgacgaggagagatcatggaagggcaaacgggaactttatggataagaatgaggagtggaagcagactaaactgagaaacaagtatcctaaaaaagtaagtttatataaataatttgaatttttagtgtaatatggaaacccctttcaaacaacttgtcagctggtgctgtaacatcactgatcaggatctcctttaatattttcaacacattcctaatattattatattattttatacattcttagataagcaaaacttgtatgatatggtataaaaatgagatgattttattcagcgaattatcatactgttgtagggtgacgtaattggaattattttatactttgtgtattttttcattttgtttttacaccttcgtctctaacagaaacgaatatgttcttgttaagatgaccagggaccggggttattataatcctggtaatgattccttcggatataattctagacgtaataacggtacatatatatttggatatttaagctaattaattaattttagactactggttaggccctaataattcggggaatagaaatgactcctatggatacaaaaatcagggacaatcgagaaattccacaaactcctcaaagtaaaatccattatttcgcattccttgtaatttgtctttaatttttattagatcaagatttggagatcacaataaggatagtactccggtgatttgtaaacatttcgctctattaggtattgattttacacctactttctacccctctacccaattaatatatatctgatgttgttctcctaaattataaaactaatattggggaattgacgttttttgtagatcaatgtagattcggtaacaagtgttcgtttttgcacagtgtaaagcgtattttgtatatgcaagatgtgtttaaaggcggagtatactgctcgacgatgaggatgacgtcggacaacgccatagagttctttgcttgtgggcacggacctacaattaaacgcttcaagttccacagcaataacgcaaacgagattcaaaccacaacataccctaacataactattcagatgccatcagggcatggcaaccagaataatgcagttaggaacagagttaaaggccctgtcactgaccaggcaattcacagcttattgtttatggacgattgcctgtttgcaggtttgaggacaggtcacatttgcgtccatcatcttcccagtggcacctttacaatgcttgaaggtcacgacgcttctgtaagttccattatcgtaatcgagggtattgttctttcttcctgtgaaaatggcaaaattaacctttggaggttcgactctggtgccttcacctgcgtcaactccctccttactaattctaaaatcaattcacttttggaggtcaattgcgatgtctcgtcggcgacatctaatcagccaaggcttctctgggctggtggttctgtcattaacattatcgatcttgcttccctaactgttgtcaaaaccattcaactcccttccaacgttgtggtcaagtgctttaagaggtattttatcattttaccaaaattaattatttattcactaaaactatctatttcactaaaactatctatttcaccaaaactccctaattgataccctcacctccactaaaactatttagctatttactcaacacaatatacatactgataatactttggtttagatacggaggacatgtgattgttggattttccaatggttatgtaaaagtgtttactcctcttggggatgaggtgtatatgtcatcgaatgaaagtggtagcatcactgctatggacggaatgcaaactgctgagggtgatctccttctgatcggaagtcgttccggggaacttactgttgtccagcttccctccttcaatcttcagtacgttttaatgtgtcacattgacgggcacaaaaaatctggaattagtaaaatcgctcccattggggctcaacacttcctcaccactggttatgatggaaacgtatcattcttcatgtggaaaaaccttatttaatcttgtgtttaactccttgtaaataatcttctcaaacactattgtatataatttatattatactaattgtattgagtacgtatataattaggtatagtatgtactatcaggtgtaattactcaattgtacaccataactattgtacaatatataaaattgtatacaacacatactgtagagtggtataatatagagtataaaattagttaattagcgggagagtacaatatcatcaatttttaaaatcatgagaacgctttcagttgcgagtttgatggctgagagagtgaccaaaaggggctgaatgacattatcctcgaacatgtcagagatgctattcttctttatgtttatcccgtagttagtaccaccttggacatgtttagcctttaactctgtgataacactgagtggatacattcctgcattttcagccagagtatagggaataatctccagagcttcagcaaaagctttcacacaaacttgagaaactccttccaaagtcattgccctaattaacaattatttacagctattaacagtttttataatgagtaattatagttacacgcagtaactatggtataaatatctaagaaatactaatgcaattagcagtgaatggggaaaaataccattgagaaagtttgtgggagatttccatctcaggtgcaccaccgccaggaagaatagatcttcttttaacgagacatctgactacacataaggcgtcatggagtgatctttcagcttcgtcaagaaccagtgtgtttgaggctctaatgaggactgaggctgttttcttcatattaaccccagtgatcttaacaattctggaagctccctctactttagactcgacctgaaaaattaaaattatacgtttttataataccaatttggcagttcccaacttttctggagtgaagtggtcgatacttgcaacttcctcacaaccaatgctcttggttataaactcgatgtcctcacgctcaatgtcctttattaccattatcttagcttttgccaagtaatcgagagataagtcctaaaataacattaatcaaatcaaaataagtgtaaattatgtaaatagtgtaaattaacaatagttaaattaagtaaataatgcgtgaaatagagtaaataataccgtaacagcatcacgtagaattgatttctgtattaggagaacattacaacccgtttgagcaatttttttaaccattttagcagtaataaggcgttcttccctcatgatcctatcaatggattggtaatccttaacaacaatgttgttgtccatatcagttttaggggttgataaacagaattgaatgagtccaatcttagcatcaacgattcttgttgggccacttgcagtttttactgctttctgatcactaaacactagtccgtcaaccatttcactatcctctatggtcccaccaatgctctttactatccttacgcttcttaagtccacgtttcttgattctggggaatccataacaccaagaacacagtcaacagccattggtgccagtaatgaggcgttctgtgataccacctatacatattattaggtttattaaatttaaatgaaaaaatgaataaataataattattcttaccttagattgaagagaaattccagcaatatctattaagagtgatctatcttcgagtgaaattggcttggaaatagactccaatatttcctccgtctaagaacatttttcaaaaattgaacacaaatatgttatagagttttaaagtaccttatttacagccaacatcatactatcggcgatagtttgtgggtgaattccttggttgaggaggttctcaaccatctccagaagagccttacagataaccacgactgaggtagttccatctcccgcctcgatatcctgagacttactcagttccaccatctaagaaatattattattactatatccatgagtaaataaaattagaaatagatatgattataccattttagcagttgggtgaaccagtgataattccttgagtatggtagcaccatcgttggttataataactccgcccttgccatcttggatcatcttatccatgcccttagggcccaaactagttcgaaccaaatcagcgacggctaaacataatttatagcatatatgtaagtgtattggaagtatatattaatttagtatggaataaaagtgtataattagtacctttggcggctaggatgtttttctttcttacatctgcagttttttcgtttctgttccaaacagaattattagaaggcggtgctgaaactttagaggccattttacaaaaacttcattaaatgaatgggaaattatcaataatttacaatacgagggattaaaataaggaaaataatttaaaatatgtgaaaataaatcaaacaaaaacggggtttagatatttgtttgataaattataaaaccagtccttctaaacgaagtagattaagataaaaatttatatacaaaattataaaagattctctaaaaatataatatttagaggtgaaagtgtaagaaatgagaataaatagagtaaaatcttgccaattcaattaattatacagcaccacagtacaagacggtcaagtacattaaacatttattatttaattatttctgaactcacaatataactcatgatttaaacggtataaaattagtcttagtatttaaattaagaactaaattcaatgacattaatttaaggattattaaagtgtttacacattgaattcttaaaatttgaaaattactttaattaaacttcataaaattccattaaaatccttttaatttaattattattataatttatcaaattagttacgttttatatccaaaattgtttatttattttacattaaatatttacatatttttagctatgaattaactaaatgattacggaagatataattaaaattaaaattaattttagtataatcaatttgcaagctttaaaaaatttattgtgtgttcaaaagagtcgaatatgatcattatatataaatgtacaatattattatatgtgataaataatgaaaattaaatcgcaaaattagtagaaaaccacaaaattttatttgtaaattataaaatgtaaataaaatgttcaatgttaacgattctaccgagagaaggtcgtcaatttttagtcctagcggacagataggattaatctgtgacggaaactcattttgcttgaatcatctaggaacttcctcttttataatagtatctgctcttggccagtttgtagtatacgattccttgtcgcttagggtggtttttatatcccttcccttaaaatctaatattaaatctatcgcatctgagtatgagaatgtatttttagtattgaaggacaattcactgtacgtattccataaatatgaacacagagaaattacacatgaacatgcctctgagattattgatgttttttatcaccagaatcagttggtaacctacacagcttcagaactaattacatatattaaggcttcttctgatgatgataattctgtgcctaaatggacccttgaaaaggttattagaatggatagtatctcagagattacaactgttttcccacttttgggaatgaataacaaagttctggtgggatttttagactcttcactaatcttactaaaccttaaatcaggaaaaacgttatataaatttactaaacacatttgtaatggtaataacacagtagatggtgttgaaagtaatggttctgacttgggaggagtatcagtgatggcacaatcatgtaataatagttcaggagtagtggcaatcggttacaacagtggatatgtgtcaatatttgacgttaataaagatgagtttttgggaggatttaccctgacaaagaaacaaaaccaaccaaaatctatgagttttgtacttgattatcttggaatcacatcaaaatctgattccttaacaagaccagagcttttagtggttgggacttcaagtggagatttggtagtttttgatctactcaaatttgcagtaatttcaaccatagaattggcccataatactccagttgttagactaatgcatattgaagctgataaatgcttgatatctctaggtaattttaacattaaagtaaaaatttttaggtgaaaattcaatgataacctggagcatggactctgataagtcatttttaagagaattgagaagtaggaaagggtttattggaactattaacctcttaacaccatatggtattacattaagtagttttttacagactaacactcgaaaatatatataactttataaatgattagacgatgaggaacatgacctgttggtgtgtagtagtaatgaaggatcggggagtttgggaaagatgtcaacaattcaacaacatcagtgtgtaaccttttccacgaaatcttctaaaactaagttgaagaagataactgggatatcctcatgttaccaaagacattacgactggcccaacatagtaacatgtcaccttaactcacatcaagtccacgtttggagtggatttaagaagattctgactgacaaggtgcttaaagcccctgaaatgaactcagttgcaacatctgtttgcctaaccaagtgtggtaactacgccattgtgggttaccaaaatgggcaaatccatcttttcatgctacaagtatattctttactagtttatttagttataaaacagtgttgtaataatttattagagctgcaattacgattctgagtttacaagaggtgatgaaaataacccgttaccagcacattcatcgcaggttattaacatctcactggttggcaattcgaaaatcatttcaatttcaaattcaaaaacagtattttttattctaacccaacagttatatatttattcatttgttctttggtgtatatattaggtgcattttggtttaggaccgaatgatacgtgtatgggatgtgataaaggtaaagatggatatggagtacgacccagagatacccaagggagtaggagcctacaattcagcagttggcgtaagatattaaacttgaataatcttttttagaattttttaacagcactggcttgtactgacgataacatttacgtgcttgatgtcaagggaaatgttattataaggaaaattacatatcactccaaagttaattctatggtacagttgtagttatttgtatattaagtcagaatttaaaaacactgtaataatgtactgtgcagaaatttcacatgaatgatagttggttgatgatgacgactgaaagaggaaccatgttggtgtacgatatattatcggcttgttatgttgactacgttgagtttcttgggaaaatcttggattttcatatggattcatcgggttcttttatgctagtatcaaatgaaaaggcgcctggagtagtattacaatatgcaaataaacacgcatttgagttgtttccaaagtctatactttataaagatataccaaaacaaccaattccagtagatattccaccatcaaagattgatttggaccaaacagtagagtcggaagatgagaacaaaactgaggaaactgaatttcaatcaactaaatcacaaattgaggcaggcttgataacgttatcgggattatcatattctaaactacaaacgatgttgtttttagatgagattaaggaaagaagtaagccaaaagaaccacccaaaacaaatgacaatttaccatttttcctaccaacaacttataaagatgggcaactggtgtttgtggaacctgagcctgaagagatagaaacaccgaaaccaagagaatcactccttaaatccacagattcccagacacagtttgagttacttttatactcaaatcatgaagataagtttgaaagtaacaatttatctatctatctatatatttatttatttgtttatatatatcccatatacttatggcgtgaaataatgtttagggatgatggaatatttgttagaacagagtccagcaatggtacatatatcactaggactgttttccgagtcaaatatggtaagaaaatatataaatattgtgtttaggaggagacattgtgtgagatgttgaggttttttcagtatcaagtgaagagtaaaaggaacgcagacgccttgcaagtttttttacaccttttcctcaaattccatgcggaaagacttactaaccttaaaagctcagatgctaagaaaataatgtgtgaactaaaaacggatctaaaaacggcttacaagctattgcaggaaagctttgataaaacctcctgttatatcaaattccttacacatttgcaattagattaatttaatcacgatttaacgcttaagtaaactgttgtattaatgaatatatggtataaattgaataattgagaggaatttagtagattatgatggggagtaaggtgtaatgtcgataatatttagatgtaactataagtatacattggtatatttataaaatgttaaattataattttattagatgtatgggtactttgtaacaactgcggccagcggagccacccttaaagcaataagatgtagattagtcaaagattccttaaaggaatacttagtttgcctaaaaaggcactcaatagaagtttattcactagaaaataatgaaaacaggaatgtagacaatgacctcgaccatttcaacccaccagtgttaatttctgttctaaacgcaagtagtacatttgttgattttgtggaatacaggccgccatcagagtctcaaacgcatttgttagttttaacccgtaattttacgctcttcctactcacatatcatgacaatctcgccaagttcacatctaaaacagtttcttctttacaggtaagtattttgctcatttattttaaggggtttttatttaaacgaaataacacatttacatgtatatttaggaacttcacggaagacccaactatgaaaatataatatttaaagtggattctgggtataacctgttggtgttttatggatataacagagtgttaaagtgcatagtactggaccctaacaactactttaacttctcagacctcgttaccattaggacaaatgacactatttttgtggatttcgagtttatttcctcagaatacattgaaaaacctgatgcgtcaaagtcatcaagttctccgaggaggaggaatacatcaactggtaccccaaccagaagctttagcggctctagctccagctcagttagcaaagatatccagtttaaatcgccaaccaggaacagttcatttcattttctggagtcaaagttgataattctgggagaggacaatgcatatggaagtaataaaacgccagtcaggtggttgtatggaatgaaactgatgtttgaaattgagatacttaacggttgtaaaagattcaattcatataatcacacccctctgttcggtgatccaataaaactaccaattccctatagcaaattcataccacttaacttggtcaacaaggcgaacaggtatgacagtgtgatgctgttgggtccaggatcaacgggctttataaattttaagagccctagacatgtaaaacagtttaaaatcgacaactcaataacagaaataacttgtttctgtatgtatagagataataaattcattttcggtgatgataatgggggattatacctgctgagactttcagtttcaacaatgagaaaatcagcaaatacagttaaaagaagagcagtatacacaccaggaatgagttcaagttctaacacactaagtagctctactgtttctagccaacaaagtaatagaaatgtaagtggtgacggagatttcatgataaatgaagtaatggccataaggcttggaagctttccagtaccctcatccttaataaagttaggtgatcatcatattttttatacaagcaaaatgggaaactcatctattatatcgatttactcgattctaaattccagaaacaatgaagaacaaacccttgaacaaggtgactttaagagttctgaatgggctcagacgaatctgggcccgataacggactttgcatacagagaagaggcgtcttcaggagaaaatacaatcttggcctgttgtgggatggggaattcagcatccttttgtgaaatttactttgggctatcatcagaggttatccacacaagtgatgttcccggggtccatgacttgttttcattcccaatgaagagtccagacgattcaagctcttcactgctttgcatatctttctttaggtttactagattttatacggtcagtttctcaaaacctgatgtttctgatcctccagagttaattagtattgaatcaacaccacagcctgctcagaataggagagttaacgctcgtagagtaaataaaagacaaaaggcaagaacagcactgataaatgccctggaaaataatcgaagaccaagtgaaaatccaagtcaagtagtaaataatcataataatagtcaaagaaatactaataccaatagaactgggaaaataacaaagtttcagaataacgcacttttatgtaatgaaaagacgattttgttcactaagctaagagacggaaacatactacaagttactccaaaaaatatcattttagttaatgattcatttaaatctgttagaagggctaagatatcacagattgtaacactacctggggacaaatatgcactgtcttcacttgtttgtagcccatacattctgttgttaatgtccaccaattgtatagtagtattagagtatgacttcaaaaattttaatagtaggtgccttgactttaccgtgtccgctatgggctgtatatctaaaaacgatttactcaactctgatcttggtatatttgcaagcggaggaggattagtaggtgttagtagttgggccaataataacatgattttattccttacagttaaggatctaaaagtcgtttattcacacaaagtaaacctagactatgatgtgtatgtggtaagtatcaaattcgcaaagattaatagtaatgtatacctgctgttaagcctttcaaacgggtttctatatatataccaactaacaagggcagatagaaggataaagatgacactaagtaataagtctaaattatcattctggtcatttaaattacttgaattgaaggtgggtagtggtgaaggagaagatacttgtgacctttcgaaggttaatttaattacgactgggcctaaatcctatgttatccaccccaaaaacgagaaaataacttatactaaaattaacatcgataatttacacacagtcacgaatatagttaacttgggaactgtagcagaaaaggaaaaagaagaattgttggtgatatatggtaaccacaagagtgtagtcgtaggtagattgaatttgttgaataatttcaatgtacaaaagatattgaaagggtcaaactttaataaagttatttacgatagtaggactaaactagcagtaatatccactattccacagtatattattaacccgaataatctatatacttatacaccaagtaactcacaatccactgatgttccaggatactgtgagaccccttccactaacacccaatctcaaccttcaccctacataagtcaacattctaataattcacagaactctaactctcagttgacggattcagacaacttgttattgtgtatgagtgatgatcaaattttgagtggaactgacactataaatgtacccagtgaggcactattggttgatattgaaactaaggaagttgtgtatagactaaatatgccgcagggtcacttaatctcaagcatgcacaagtacactcatgatgatcttggaaaggactacatacttttaggaacatctaaggtgtctgaagcaaacgatgtccccactgaaggatacttatatttcctggaagtttataaggaagcggatgcttgcacagttgtagttaacagaaatgccatccctctggggggtggagttgttgaaattactaatttgaacaaattcatagtaattgctgttaattctaatgttatggtcatttcccttacagcttctaacgaaaattccagccccaatgacccttccagttcaagcgctgttaataacgggagtcacaggcaaggaaccagaagtaaacttgaattggtagatttaaaggattctcgactttcgatcccaaaacaagatgaaaccacactattcattgatgttgttgcaaattatgactccaacacctttgtagtttcactggacactaaggatgacgtgattttcgttggtgaccttatgacttcagtcaagatgctaaaattcagagataaccgattattagaaacatgtagagatttcaatactctgtggacaacatcactggctgccgttgataactcttcatgtctggtttctgacgatttaggtaactttctcctttttaaaaaagttcaacaccctaccacagaccagcagtccatcagatttgataaacaagggctatttcaccacggtgaggttgtaaacaagatactaaaacggacccaaatgtcagtacagcatgtggctaactctcgtatgtcaaggagtaacccaagtatcttttccaaacccccctgactactagttcaataaatccagcattactagttatacaatgacgttaataatgtttatataaacccaaaattaatagttaaattatttcaatcagttatataaacgcaacattaatatttgtgtaaattcaccaccaccaactacatgactcaacaacactacttatcatatcattaatatcgtttaggagaatttatggtttctaatcgagtagtttctgaaagtgagagtaataatccttctgaaaccttaaatgttaacgagtacaccaacttgtttaagagtttcttcacctgtgcaacaacttctggtagtttactccaggtgtgcttcttcgacgatttgaacatgttcctgaagctgtcgctgctagagcacacaatgcatctggttcaaaaggaccttgggaacatcccaagtaggaatcaaaggaattttgaggacctacactcgaacattcccaccaaagggttcgttgatggggacctcgttgaggctttcctaaagctcccagactctcttaaaaagtgggtatttgaaactatgctcattaactcaaggcacctcggagttaagctgagctctctcgagtctctactctatgaagttgatcacattaaacaccttcgacttgaataatcttctaaatcctctatatactcacatactatacttagtagtatacaacatataatacattatggaatatatataggtatgttagatgaatatactgaagaacagataagattaggaattatatactgcgttgtgaaattagagttgcccacagtcctcaacaacgacgggttttgttggttttccactttgagttccaacagcttcaactgccctgacgacgtctttcccctcaacaacctgaaatatttatataccagacttaacaaatattatgtaataattataaatattcaggaaatctagtttaataggactgtgtaaaaagttacctcgccgaaaacaacgtgcttaccgtccaaccactgtgtcacgacggtggtaacgaagaattgggagccgttggtattggggcctgcatttgccatagataggaggaagggtctgtcgtgtttcaatgtgaagttctcatcttcgaacttagctccatatatgctctttcctccggtgccgttatggttggtaaaatcacctccctggcacataaaatggggaatcacacggtggaatgtagagcccctaagaaaattatatagttggtgttgaaaagacggtatataaaagataaaagtggattactgacttgtagtggagagggtttccgggagtgctcttttctccagtgcacaaagccctgaagttctcggcagttttaggaacaacgtcgctaaacaactaaacaattatattgtgaactttgtaagtatttgtggataaacgtatagaatagatagtagatagaatagttagatccaataatacttcgaaaacgacgcgtccggccttagctccgccgacggttaaatcgaaatacacacgtggtctctttgacatttctggcaatgtttgagaaaataggtcaaaaaatttatgccttctagtaagaacaagattatttatgaaggaagaataatgcttggggtgattgtggaattttaagcagctagaaaaaattaataattgatagaataagatcaatagccaagagtattgtctaagatgcataagaaggatagtagaaaagtttcgaagtgatccagttaaaaaaccggtggaatctagaaacaaaacaaactttatgaagtaaatagatgataaaattaatgtgttgatggggtaaagaatccgtcaacattcgttgtacagatgctcaagtttgagatttaattttaatataattgtacacatttgagatataaacacatatgttttatttgttttgttgtagtatatgttaaacttattttcaagctaattttaatcatgattttcgtaaaagtatgttatttaaagtttaatttgtaatatatcctgtaaaatattgtttaatttaaaaaattaattctaaatttattaattgttctttttgtttttaaaataatgtggattcattattgttcagtaaattgagatacaaagtaataacttgtttaacaaaaatgttaaaggagcccttaaatacaataagtggcagctcagctgtttactgtgatgttatcccatcacttttagctgaaaggatagatcagctgtctgtatatgggcccctctttgaagccctcactaataatcactttattaaatcaggctacaacatgaattcaggctctgtttttagtaaacctgaatgccaacttgaggttgaagttcgtctgggctttatacagaatatcagatcagagcatcgattcacactaccggttacaaccgatactctgttggcctcaagagccccagtgaagtttgttccaggagtgaccgaggaccagtacaatgcagccagaaactttcttattgagacttcagaggaggacgatccgaagaacgagtggactacctgcctaaattcatgcaccataaatagatttttcgagattcaaggttacgatgaactggtcagaataagcgtttcaaatgactcaaactctccagttaatagacaacaaaaggagccagttgatgctattagaaaggttaacctgctcacttggaacattagctcaggatcaactgaggagcctagtgaagaatcggaagaattctcaacagggcttgaaggattagactacagaattgcagtaaatcttgagtataaagtaccactaactaatttgccaacgacaagtaacgctaaatactgtaggagaagattaagagattcgtttattcacactgaaagtaccccttaattagcctaatttatacagttacctagaaataccaccatataccacctacacctatagttcacagtaataattttataggcaagatgagatttgatttatctaaggttgaggatgtgacagagaataaggatccgacaacgtccaagtttgagatagagatagagcttttaggtgaagagattgtgaagagcttgatggacaaatcactcagctcagatcaacgcatgatgaacctcaagtaccactgttcaacactgattaggtcctcccggtatattatggatctaatctctagtaagaatgaacgcctaaagtactcgtctttcataaactcaatttcagaaaaggtaggagtgtacgacctgaggatagtatcccaggacccagagtcagttgaaaggtataagagatacttatcaccacagctcccactcattggagattatctgtacagagcagtatcagttaacctggaaaagaaaccagacctgtataataataggaaatcactgtatacacaagaagcaaaagatataccaggaccatttgttgtcaaaatggatacaaatggacacagatatgtaacattagataaatgatgttttatatatgatatatactatatgatatatgcgttgtattaaatattttatttcttgtagagctgtttaattctggtggaaagttcattaatttttttgcgtgtttccgcaagtttgccctcaagtagaaaatgctgccttttaacacgagaaggagatccgggacctaaattacagcgtatcatctcagattcaagccggtccttctcaaggtaaagctcagtgagttccttttcaagatcgtcgatttttatttgagtctcatcatcaggaccatcaaacatagttggctgaaataaatccttgggcttttccttcttagaattggtttcagctaacttttctttgtacaactcaagtagttcaggactcacagtgacagtatcgttgttcctagaggtggtctgtagtagagatttaagttgatgtcttaagttattagccttacatttagtaacatatagttcgtttaagtgttccttgaccagagccttttcctggtcaagtttcttaagtataatggaattctccttaaacatggcgtcattatctgcatttaattgtttaacatgagcccttaaagtgttaacttccctagttaagctttccagttcaggacggttatcagctgccagtaaatcaatttgagccctcttaagctggttttgaagtgtgttaactttttcctcaagagcagttatcttagaagattctgaaatttcaaagctacgaaggaggttttgctgagaataaactgtcctattcaagtctgaaacgtcctgttcaagtttacatttgcgattttccaaagactccttctcatttaagaggaatttgttgctgagaagtaaagagtcaacttgagccttaaggtccttattaacctctagtaaatcttttttctcctgatttagagcataaagctcctgctccagatttgcagacttggtagtctcattctctagtcttaaataggcatctgccacatccgtttgtagtctggatataagttcagatctgccatgcaattctgtttgcaaagcttcgttatctgatctcaaagcattcagaagtctttcattctttgatagctccccatttaagttactgattttaaattcacgttcatctagttctaggcgtaagttatcgtaggatttttgaagactttcaaaagcactggaaactttctcaaggctatttttggtatcagactcgtcaagcaaccagcgttcacgctctaatttcatttcttgaagctcaagtaaattcttcctgttagtctcataaagctcatttttcaccattgccaacttagttgcaagctgtttattgtattcgtcctgtaaccttagactttcttgacgcatctttttctcagagtcagccgcaaacctgtaaaaaaagcgcttctgcctttcggtccagccctccaaagatgagttatacttctcttcatatttggatgtgtttaaatctggatactcagggttctccctagttgtggtttggaaactactaacattcccagccctaccggtaaggactggagcaggtaacactataggtttatcaccttctcttgcagttcctactacatgattagactgatgaattacatagatatcataaatatatatctacataggtaacaatttatacaaagcttgttaccttgtgttaaagccttcaatactggaagcgtgtaaggcaaaacccattttttatcaggagcatccacttcagaatctttaagtatctttaattttgctccactcacattaccaatgcctaattaatcattaaacaaccacataattagtataactaacaattttaaaactaaattagctgtatattgatgagtatgggttactgagtgatttaaagaaatcattggtttctttaatggtattatcaagtctatctgtaatgttttttaaaacgtcttgagccattttaatttaatgtttgaatttagattttaaatagccttccggttgtgagttacgtctaaaaagtccccaaacgactacacatattaaaaattacttcagaaccgctgcgatttagtcctttaaatttattaaagcctgtaaacctgttatttaagcgccaaaattagttaaaagtgcagaagcctatcccccataggccaaaggtgcacttttgatcataaactggaggcatagggtccaactccagacacatctacatctaatagacacgtaataaaaatttaatgagatttacagaattaggtgggcctagatgaacgatccctgtttaactccccaaaggtaccagtacagtaacactcccaactaatggcattattattatgtttatagaaatattattattaaaattaataatagcattcaacttactggttgtccggtaaaacagaataaacaccaaaataacacatttccaagtgttttattgttttttatctgaaggatttattttcaccatattttttatttttagataaaactttctaaaagtagttagaaacataccacatccatatcggtaaaaagaagtagtggaatttgtcccatcatggcccagaaaacgtaccctgtccaccctagtcccagaggcactgatatcagatattcatgaagtgccgccgagataacgaaaaccacgatgttaatgagccctctcggtaagcccaagttcgtcaagggcttacttatatgccttattagaaactgatgtatgggcaggttccacttcctccagtactccccgaaacaggacgcattccaccaatcctacaccagtatacatcaggtcacttattaataaactatattatttttaactatgtgaaagatgagtaaagtcatactccgtagaaacgtcgatctccgaaccgagtgatttcagctaggaaattacaccagaagtggaaaatgaccacgaacatgagaagccagcagtagagaatgggcacagacaacagcaacatctaagatatttatgttattacattatattgactaaccctatctataatatggcatgcgactgtgaagaagtttgcagatttgaattcgtccattgtgaatgtgttcgtcactgccaccacaatgtactggtctgctaaaatcctataattcggaatatacacaaatatgaaaactcacttgataactgctaagaagaaaacaaattgtaaaaactgtttaaacgcagtcatccagttaattttaggtgtcattggataataaaactataacggctgtaacattatagtgttaatacctggaagcaaactgtaggcataataatgaatctgtaaaactcagttaacttaatacaatttggatatgttgaagcaattttcgcttcttttctgcttttgcacacttccaacaagttatctccgttactattaaatcaattttatagtgtaaaatataccagaccgcttttctgtaatcgaaacagacgtgatgaaatgagtacattttaaatgcccaaactactgaagtgatcagcatcaatgctgatagcgctaaacattaataaattacttaaaacttacatggttcggttttatatgatatgacagtgagatatgggtatagtagaacaattaaaatgttcagcagttggagtaaaaccataggtagtgttaacggctttgtagataggggtgctatgaaacgttctattccccaggcaaacaatattgctatatgagtctaaataaaatatattttccataaactacggtatatatgttaattgatacttttaaagtacatcgtagtaagggccaatcttgatacatttgtgtaaaacccttgggtatttccattaaaagtcctaaaacaaaaatttatccactaattcaacagtatataaaacagtatttacggtttctaagtatggtaccgtattttctgaaattattaataacaagcctgaagttcatggctactaaaattacaaaaactaagtttacaaatcccgataaatttaagtgtttcattcctgtagataacaggctttggcgacattcagtatgtaaaatctcatgaagtggcctatattattatattacccttacacattactataaacatatctacctaatggtagtaaatatataaatatattgttggttgaataccgtcctgaataatctttttgaggttctccaggtttagataatgaggaatagtccactaaaggtctatttggtgcactatttgatcttcttttcctgatacttcctcttctatgacttgggattctacccactgcttccggagcctgtttactctgataaaaagtgcttttactttcattatatttagaatcatttacaaagtttatgttttgtgagctaaattgggtccttttgatggaatcgtttaagaaaaaggtgctaattgacctacaaatctgcttcagggatttcgatctagatttctccggcagagttcgtgtattaatcatcttttcttaaattattaccttaaatttaaatggaattctggtccaaaacatgatttaaaggtaacataatttaaaagttaaaagtttcagccaattttacgatatgaaaccatactttataggatcaacaaattactatattttttacattatttaatagacattttaaatattaatacatccacaaagaatttaaaaattactctattatagtgtcttgtatcatacaccgcatacaggatacattatatatactaatttataaatgtgtaaaaaaccacaaagattaatttaatattaaaggtgatactaattcccagaaggaatctttaacgatatcacagtgtaaaactaatatattatgtgcagaggcctgttccttaacttttgaatcaagttcatttagctctgattgattaatttcaagagcaatttttctttctttatccactaatccctcacccagaatctcaccagattctcttttacacatattatctgactgatcgaacatgttataattaatacaattttcgccgttagagtttacatctttggtgttggattttacaagtgtcgtccctttcctaataaacattaacttgttaagtaattacttgaagatatttggtaaattattatagttgagtttatgcgatgtgaaaaggtactcgtttttttccaacttggttgtgccctgaagttattttataataatttaaacaaacttttaaccaattatatgcctcgtcattacttttaccatccaatatcaaacaccaaaagcaagtattatattgattattaatatggcctaaatgcatgttaatttgttaagtactctagtaataagtataaaaaagttacaatcaacgtgacgccatgaaaagtaatcgagaacagattcataagtaggataaagaataactcttccgtcaaatgaaggaactgttaaaaggggtctattcgggaagaaagtgtcccaatagtaacagtatgacgatgtaaacaccgatacaacacatgataatattttcctagtaaattaaattaatacacaaaggcatatataatagcattaaaactagcaaacatactgtttccgtctattgtacaatttagtatctcttttaaatagaaaactaaaggaaaattgaatataaaagaactttaaagtacctatattcatcagaatgaccgtatgctagaacgatatcgtcaaattctgacattacattgactgctgcagcattaattacagaaagagctctaggttcgttgggtttcctgaactcgtgcctattactaaaggcactaaaggctctaccgtcaactctaaccactatccagcagtcatttaacagagtagaatcctgctcaaactctctaacataagaatacttcgaattggccattttaccagcttaaatccagtacatattatttgcaaatattttacattcaaatttaacacatattattgaataatataaagattttatcaaattatatgtggaatcaagatagggttaaaaattattaaatcaactctttaaatcagttatatcgcataggaattaaaaaatgatttctagctaacaattcagtttttgatcccaatttgttccttctctacaaattattatacacatcaaccatatatagtaataattatggtataatttttgaattaccttggtaatagtattgagtaagtgattccagttaaattgtgtgttttctaggtcgaatttcggctgtaataacataacattgaagagtataggcagatcagttacaaatgccaagtttgcgtacagttccattatattcagagacaacccatctagctgtacaattctctgtttgtattcaaacttttgaacagaaacatcagaagaatattcccgattaatagagtcaattggatgattcagaagtaagaaaagttgttggagtaagtcacaaatttgagtaacaaacttcattatgtaaataccgctaagtttggatcttgttgcatatgtatataacctcttgcagtcgtttacgtctttcttattaagttttctaccataagagtcatatggaaacatactgaacaggtgatccattattcctacgtataaaagaggataacctaccattgatatgttctcctcaaggtatttccttgccacactcctataatcgttgttctcacagattacctttagaacagtgaggaatcctctagttttcttcaataatctagcatgaacggccaatatcatctcctcatcccgaggattatcaaaaaatcgggaaacacaccatgaaacctcctgaaatctgacatagtactctacacatctttgagtttctagtctctcatattcgccattttcagctgtgctcaacctacctatatcacatactttataccattctacataatatagtgtacgatagttatataaggaatgctaattaataaaaaatacttaaatgaacagaatcgtttaaagtggagttcagactgttatattttgtgagtgttgatttaaaactaccatatctcccgttagaattaagatttgaggaaaattctaaaattctcaattaaatacacttaaatttaccgctatttttatttgaaaatccaagagaaacaggagtcattaaacatttattaaaatacttgatgaagaactaaaaacaatggtgttaaataataaattaaacctttagagcaagatagatagcatcttctcccttctcatccttcttaagcggatctgctccacctttaaactgctcaattactcctgaaatgtcatttttaagcaaatggtagtgtaaggggaatttatcctcaaatgactcagaatcgccaaaaattaacgacttccacgaatacaccattttttaccaaaaagctatttcatttaaattaatttatttataggattccttattattttatctttttgtgcccttcatattttccattttttgcacctaatggcacccttctttatttcaggaaggctggtttcagacaacatcactcctccttcgttaaattaactaaaatccttacacaatttatttaaactgtttttgtattaaataatgtttagttttaaattatttttttgtaaattatcaaaatgtgtaacacttttgcttcttttatatagtcgcgtttcccaatcaagtgatgatatacaaaagcttaagaatggtattaagattcatattaaaatccactataatattgtataaatgcaaataatgtgaaaatgttcagatattatggttatggactctaatgtgcatgacttggcgagagttttggataaatctttgtacaattcgttccaaatttccgattctgtatgcttaggtattgtaaaattttcatgtaaatgtttatataggtgaaaatgtaatgacttctggtataaaagctaagggtttagctggttattggacttttgataagttgtaccctgttgacgagaccggcaacggtaaccacttctactctcctgtcgtatcaggtcccccttcaaatggtatttttaaatctaactcaaaaacatctaggtcacggttccagtctttccttcaatacgggtattcacatactttttacactaactatgccatggctataaaattggtttaatggaatattttagaaacttggtacaggattagggctactgaatcactggatttgggacaatttactataacttttagggtttatctcttgggcgattactcacccaattttcgtaattttttgtcccgaaattactataatccccaatcacctaacatcttattttacccttacaacaacaagctgtctgttagagtgtttacagagagtggagatatcgaggggctatcatctaactcttcaataccatcaagacgatggactcaagttaccatagtctgtactgagaatgctgttaaaatttatattaacgtatttttcattattctcattacttttttagggaatgctcgataattcaattgtaacaactgcctaaccatatcacatatttatacatccgttaatattcatgtttataggggttgaggggcaaacctactgtcagttctggagatttagtaatggggaaagcactcagatacgatggctttgctgtaccaatatacataatttccaattttatattaaaatttattctatttacaggggtatgtcgacgacttgagaatttataactatggtatgggatcacatgaggttgccgcctttgtgtctgactgcctcagtggcttcgataactcttttagagttcagcttggatgtacattttgcggtcacagagaagctaactcaaatgggttctgtccatctggatttaaactctgcaccctcgaccaactttacattagtggagcacatatcgcacgagctaacggctggttacactcaagtaaccagatttggtacaaaaacatcaaaaacactcaaaatgaatccagagcagcgctttgttgctcttaaaaatgattatacttttatattatattatatgtaaacaagtgtgtatgtgtagtgggttataactttataactttataaagagtgttattcttgagtgagaaaatgaaagaggaaagcttattttttgaaaaatatttagagtatttaagatgtcctggctggtcttggtcctgaaaatcctcagcgtcctgttccagtgaatcgtcctgaaagattctgactggcttattccacttaatggtcctcaagctgttaacctaaatatatattagataacttaaatggttactgaagctttaattgaattaacatcatgaacatctacgtctttttgaaagcagaagaatgtaatttctagttcatatgacaccttaaccacaaagtggttaaaggacggaaccaagagtcctggcatagatgaggttatggtgcacttctgcttccccaatgtgctcatcgactcatcgatcactgttgattgctccattttcccagattcagggcaagtttctgaccttattaaccttactctagccttcaaacagtgtttgtaagctcctgaaaagtcaaaatgcactgaaaaccacgagtcgacactaatctcaaggttttgtgccaaattagtagacttgaacccagaaataacacaactacacagctttaaaccatcaaatgtaaaactcagtgtttctgaattaacattaatatttcttttaaaagttacctttttgattagttccactatctagtttacaaaaattgggcgcggttgttttaattagttccaggtgatcttgttgatttaactgcagcctttgttccaaccttctcttaaacgacttagttagttctgttagtgaatctggattttcttcacctggtaactgaactactgtatgaaaactctcaaaacattttttaacctgttccatcttgtaaggatcaaggccaaggcttgaaaacttttcaaacatatcttctaatgagctatgaacactttcagagggagatcctacgtgttcttgtgtgttaatacaaacatcataaaaggtccaaacaaggtccaaatcccttgaaataatggaattgtttgacaaaggtggggggtcgttatcttctgacgtatcttccactgaacacttgaagctgaagaacaaattctggttactttcatcttctccaagataggtttcaatcatctggacacacacactctcatccatcgtatccagatttgacaaatcaaaccctgttggtttgggcaagattgggaagcactttgaatccaggagtggaaagtctaaaaattagataaatttctcaaacgtaccaaagtaaacagaaccaagaaggttaaattcaagctttctacttgttgttgaaatttcatttactgagtttgggtttcgatattgtacagatgcgtataagaaatatgaatatctagaacaatgtcatcagagcagtgtaaacttacgatacatgtttcccgtggtatgaggggggaagaaatggcgggattactgctttaaaccgatctaaacatcaatattaacttgatatatttggtttaattatgtataattaaactgttactaagtagttgagtaatatacattgtacttacagcaaagttcatcaaaatctggtttaaattctttaaatgtgcaaaaaacaactggattagaggtgaatatcagtgaaatatcctggccgttatttagttctgctctttctgattggaggaatggaaagtgaagagtattgttagttttcgggatggtaattgctctagtatcgaatgtaagcactccataaaggttaactgatatgaaatctatatttattgttgatttattgatggaattttcagattccactggtaatacgttaataaatgcgcagaacgggccaccagagtaatgtattggatctggaaccacaatttcaattctaacaacttctgaatattcatctgttttgtcttccattaagaaattaagacaaaaatttctaatttatcttttttcactatcagatgttgggatatctaaatgtgtaaacaaatacacaaacacttgtataaatttaatcagtattcttcataatttaagttactatattagggaaaatgaggttaaaagttggactgtttacttttgcttcttctacatttccaaaatattccattcctctatttagcaccaatactttatccactttcttaactatttcttggttatgtgtgactatgataagcgttttttcatttctcgccctaaaataatacataaattaacaacttacatttcaattgcttgtgttaccagctcttctgagtaaccatctaggcttgatgttggctcatccagtattaatatctttgattccttcaatattgttctgactaattaatatattcaataataaatttaataatcgaaaattttaaaaatatgattaactgctcaaggaaatagaatttagatgagaatacctagggctattctttgtttttgtccagtagaaagtgtgcatcctttaggtccaactggcgtatcatactttgaaggcagtgattctatgtactcgtgtaaattgcactgtttagaggcttctataacttgttcttttgtggcttttttatttccgtatttcatattttcttcaattgacgtcgagaacagaatcggttcctggtgcaagattgagaacactgaacttcttagccatttagaacttaggttacttatatcatttgagtctagtaaaatctctcctgaggttggcttgtaaattcccatgattaatttacacaaagttgttttccctgctccactcggtcctactatcccaatcacatcccctgacttaatcttaaatgagacgccatttattatttcagtctgaagatttaattcgccttgtctagcgtcatcattatcacgaagttcgccaatatcttgtaatttattagctggtttagtctctgggaattggaaaaataaagaacaaacttctaaatctcctctgacctataaaattgttatacattaataaaaatattatttgttaaataaacctcttctagttcaagcaatttctcttcaggctccttcaaatcggttatttcatacacactccgcatagaatttgtgcctctaacaacgtccgtataaatctaaaccaataattatccataatccaatgacttggactatcaaattccaaataactagttaaatgtttttgaacgaaccttcgacaatcccgatactccaagtcctattaagcttccgtaaatgataaatgatgcaaatttccctaaaatcataccattgaaaagttaaaaaaccaacccactgtaagtgaacccgacctcatttgcttggacccaaagtaaatcatgatcagggttgaaaggttaaaggtggctaggatagaccccatcataatcccctctgagctgttagctctaattgcaacttcatcgcattcattcaggctcttcataaaagaatccgattcgtattcctcctatacacattaaattatctgggggttaaaattttatataactattaattctcagtgaattgtgaatatttgtgtataaaatacatttgcaaatgaaataacattctctattccagtgataacctcttccgccttggctaaaaaatccatttagtttaatcaacaaatggctaaataaataggttacactaacccataacattttcaagtcttgttttcctaagtgtctgatatctctttaccatcgatgaaagctgtcttattgtaactcccataagtggaagtgagaggagtatgacaagtgccagtttagctgaaatcgagaagaggtggcatgttcctcctatggctgagttacagcatctaagaaactgcatttggctttccaccaaagccttagggccctcttcacagtcactaagcaacttagataaaaggtaattacaggtgtgcgaatgaaagaaaaataggttttgtgaaagcaattttgtaaatgatttccttctatatctcttttggatcaaatatatcgcagtttgtgtgtgatagactctaaaccatgaagccatgcttcctaaaatataaagcgggattgaacacactagaatcctgttaaacaagaagtctgaccctagagcatcaaacttcgagaataagttattgatagcaaaaagagggaatggaaagaagtattccggacatttttcaagtgaaggagctttagacaaatcagatgagtctataagtaagcctatgattctgggataaagcatgttagttatggcgttagccatcaggcccaaacttcccaaaattaaatgatatttctcatcaggttctaattccctagcaaatctgataactgaggtagataatgggatgttgtcggaggatttcataacttcttcgttaggaactgatactctattacccatttgtatagatgcggtacaatattcttatatattacagtatgatacgagttatttaaaggatttgttttaccaaatagtattaaatttcataccaaaatataatattacaatcacgatacaaagaaataaacaacatcagaatattgaatcaaactacattgaataatattttaattaaagaagcgctttttaatacaaataatcttatagaaaagttgaaaacaatttgatttaactacatttatgtttataaatataaaagagcgacagaaagtagattaagtcgataaaggggggcaaaaatgaacttctttacattatatatgtacacattaaaaataacgaacgatgtgtaaataaaataagatacttcattgatgtttaaaaattttgtttattttcgtcgaatttaacatctccccacttgacttcaattttcataaaaaattttatgtttttgaatccaacgcttctattaattttattaatggatcaaattattctattttctcattaaataaatgtaattatttcatcataataatccaataattaatttaaagtattttttgatttaatttcttacataatgtctaaggccgtctatgccaggctttggatggccacttctcagtttcatctcagaaggcattacggttggatgcacgtgtggtatgttttataatgtggaatcgaattatataactatgtaatatatatttacaacaattttttatattatttattaggaaacgcctttctcccctaatccttgtttacggatcacttggactctggttgtatttccctgctcttagctatgagaatcaaaaacgagttactttcggtttatggaatcctcctgatgttggttattataaatttttgggcaaaaaagaagattgatactttacagattttatgaaaatacaataacattacatttgtaaattttaacaaatttctttaatatagtttatttttatcatgaatattagtttatttatttcaagttggtgtcctgaccccatgtgtatttataaatctgaatatttccattatttagctttgtaacaacaatttctattcattttactaaccaaaatatgttattttacatgttaactggattcggagtaaatgtgtgtgacaatgaactagtttttgaaaaatgaatttattcccctattttttatcgcacatattctgttttactctaactatcgcactgatttttcctaattttagccttgttttagcagaattcacagcaaaaaaagacagttttttcttggaaaacgtactatcgcatctttataaattaggggacgaaatgtactctgagtccccagagaataaaaagcttatcagacaaatattggacacaacctcagagtcatttgattataatggatacaaatggttattagaagaaagtataacatacttaaatatactatagttagtttaatggtacagataatcgtaaattttagctgttgtcaactttttttagtgaccaatagaaagtcgagtaaacgatttactcaggctttggatcatccacggttcaacaaaccacatgtgagaaacttaattaattttaatttatcaattatacagtgtgatagaggtagttgggttgatccgatgagtggattcggttcattgggaacgtttccaggcgggccttacagaggttctggcttcagcttgaccacatggtatttatcactttattgactgtttaaattgattttaggatgggaaacatgtataaaaacgttcacacccccgaatcagcaaatggttttgttttatttaaattataacttggttagaacccgccgcggcaaacatggctttacaaatatttaacatggttaaaggagtaattcaaactattatagcaataatagtcgacacagttcctccaatggttctcggaaagtaactaatttattttttatacatttcctatgtagttataccactttattcttcattaattgttaacaaataatattacattagtcctttaccatgcttaccaatgctaactggtttgtactaaaatcttcaagtggaattaggccttaactgcatcggatcagttctgtacccgattgctgcaaccgatttcgtagttgcggacgtcatcgattccagcatgaacggaataatctcatcgtatgttttaaaatcatctgatcagaattttgttttagttttcctgcgaaatacgcagctaaggttggaagaacagatgactttagatacaaaacatggtaattcaaacaaaaaacaatataaataatttccttcagcgccaccttttaccttgggatgtattggtaagttaaccatcaaaatttaatcattcagtgcaagtattttcccaatgtgcgccaccggtgcaggtattattctaaaatactagtatacgagtgtttaaaattttctttagcacaagttgctcaaacatttcccatatggtatctatcatcaaacatatttacactatttgttaattataaagttatgtatatagcaatatctcctgaaggatgaaagataatacttatataattgtttaaaatcacttttcagtttcccccaatgtctggcagtactagttgcctgtcccggattctggatggatggtaatttaaaaattagttcataattgtgtcagatattgccgcagcgtgtggatcaaacgtttcagtaatcattaaacttaaattttataatttatctcaggttccaccattctgctctttttcagcatttgtgaattaccctagaataccacctcagtacacatcatacgaggcttcgaaactatacactgaaatttgcccaaaatatgatccaaaccaaggtatttttaattgccaaaccatcattgctttataatagattactgcttagtattatatatactaataacgttttcagacttaccacttgacttgtatagcagaaaggacggtttccactcctcaatatcagatgcatcaaaggaaaaggctgcaaaattacctctttatgaaaaactaattaggtccctagagtttcattacgcaccaagacctaaaccatgtgattgcgaaaaggtgaaagctaagtgtcaactccacattccatatcctatacatgtaaatgaaactatattaacaataattacctttagatcaaagcatccgaacaaatttctgagactcattacgagaaacctcaaattacaagtgagtatgagaaaagatgctgtactgaatgcaaacccatttgggaagccatttactctgttaaatagttcctacgagctgaacttaatatcttttaattatataccaaatgtgtagtgcaaatttctaatagtagatttaagatacgttgattattaaaattcaagttagtttaatcaaaagttttccttcttgatactctgttgtatgtcggaattaaattagtctaagtataataatattaaaaaacttactcctatttttggaacaaataattcttcacttccatctccattaattagttctccattctaacattattaaatctaatcgacttactttgagttgcgatatgtgagctttgttcaagatgggtttaccggcagtccttatttccgacccctccttaggcaacaaagactcctaaataaggtatattagctagaaaggaacgtccaatgattcctttaaggcactgtttagtatgtttatacacctagtgagtcttttaggttcttccttcggaatcattcctaccttaaaattaatttttaacgacaaagtacatcaaattgaggttcatagagtttccttggtcttggtttatcccgttcgtagttaaagatgttcattccaggggtaccatatagtctttgtcgaaccttttcagtcaatatgggttgttttttcttaggaatccatcgtgtcatttcgtcaacttcagatacattccattctaggatgccttttattagtggtgatctctgttcacatatttttttacccctactcacatttacaccttctggcattttaaaaggttaataaatcaaataaatttaatttcaattagaaataaataagggttatctgatgattctaatcagacaataatgctagcaagacaaaacacttacacaccagtgaacctgtgaacagaagattcaaattttattaatttaggatattcgtttaacaaatataaattgtctgtttattacacaaatgtcttcttacaatacacatttgcaccatcaatccaaacacaccctaataccttgattttattgagaaatacataacacctcttacaataaagctattcacgaccttcttcataaaaacttaaataattttggctctataattcctaaggattaaaattatttcttcacatcaagacaaatctttacttttttcataactcttaccattgaagaatcacttctcatccttcgtcattaagtcaagaaccctaaggtcatccagtatccaatgaacacgtccagctctcacctatcacttgaaaacaattcacatgttctaaattaacttggaactaatcttatttcttgatatgtaagatcgactctggataactttctgaacctggccttagaattggatgacactaaatgattagcccagttaattgtatattaacacaacttacacatctggctcaatgttaagaacttaatagaaacttagactaaatacaactggatacttaaaaaactgtctatagtataaagaatgaaaaaacattaaacattaaagattaaacgttaaactgacaaagaataatccactatgacttaatgcgtttatcttttaacaagaattagtaagaattcttactaatcgaataacacaaaacaatgatatattcaatatatcagcaacactgagttacaaattcgttaactcaaaacaacaaaacataattttcattattataattaatttggatattgaaatgaactggtttagtaaaactacagattttttattccatgaatgtttgagaaccaccactcgtcgctgtagtagatgattgtgttttaggagtggtagaatctagagcatctgccaaattaaaatctctgggttctccagtagtagatggtgtagttccagaagttcctggtttaggagtgggtgtcgaaccttcacttgaacttgatggaactagagcatctgccaaattcaactcaccaccggtaccacgaagttgtgagctatctgaagcttgaacagttttaacattctcactttcatcaacttcttttacaccatcgtctgcagttaaatctcttaaaccaatttctttcttttcatctgaagtgctcacaacgataaattgattgctacgaagataaagatatacagcctttagatctttaaaggttttatcacttttgtgactccataaaatcttatcaccaaacctaacacgatgacaacttactccggcagttaattcataaccatgatttaaattattcagtgttactttgtatttttcagggcttaacagtacgtatttctttgtattatcatcataatatgacatcttaagaccggatatttcggaaatttttgaggtaatgttttcccaatctccgttcggtggcttgtgtaacaatgtagccttttcgtcaattctcaataaacccaagtatttttccttacctgtaaccatcaaacatgccttttttgatagctcattattattgtttgtttcccaaatgactgtatctgatccaaccttttttggctgaaccactttgttgaatacataactgtctttagcagtaaatgtggtaaattctccttttaagaaatagtcaaattcaatattactctgggtcttgttgatatcaagtgatactttgttagaaacctcagcccatttgttccctataccagccttatgatagtgtttaacatcaccattagataggtgtactgtaacattcttcgttttattgagatccggaagaccatccataacaactttagttccatatatatttgtggcggtgctctgccaaatgacagttcccgaaccaagagcagcacccttgatgactttggtaaaaatggcattacctcttgctgtgtatattttgacatttttctgataatcttgagtgaagtcaaactcatcacaacatttttgatttcttatgtcaactgtaacagctttcgcctctttcatctcttctaatactttagtttcatcattaacaccgattacgtacatgctatttctaatgagatcaagataaataccttttattttacccaagtcttgatactcttcttttttgtacactaccctgccttcgtatgtaattttggtacaagtatattcatatttaattgtacaaccgattgacatatgatacaaagatatagtatattgatctggttttagtgttttttcaacaccattttcggtagcaaacaccttgagattaaagaatttgtgtctcttatcggttacgttctcaaattgtttacctttgtcggcatgaaaaaacgcatatttatggcttgcaagaaacactaaaatttgtttttccttagtattggtgtcttcccttactctgacctttgttgcataatcacctgaaggtgcctgccataaaataacatccgaacctgcagtttttggccttactattttgttaaatccataacctcccttacaaatgaatgttctgtatactccgatatcgacataatcaaactcaattgttccgtcacttttattaattgcgagttctacaaatctaacagaaataattgtcaaggaaactggttcgattgttttttcaggttcggtgcttggacgggttgttacaggtgctgtcacaggagttatcttggcttgagtaggtttaaattcaatcttcttagactgggattcatccttacagacgaagaaactgtttgaaacaagaccaagatgaagcatcttaatggtcgaaagatttggatcatccgtgtgtttccatacatcgtcttgtccatatttgatcttcttgcaattgactccgctgttaaacttgaattcaaatgaatagttaactagagtggatgtgtaatcagaagatttaagttccttgtcaccatcaccatagaacttgagttgccttacatcatatctttcacttgtgacatctttccatgattgactcttaccaggttgatgaaatagtttaaatgaattatctccaaggagtatggcaaaatatttttcattattttcagacttaactctgaccagtttaccgaaaatgttatctttaatttcccagatgacagtacttttctctgttactttgctgaagtagtgcccagacttaacttcatacttatggaatatgtcattcttggtatattcgaactgattagtggactgagtcttttcgatgtcaagggtaactggtgtaccagaaggaggaggtgctttaggagttgacacaggtgttgcagttgatgtaactggagcctgttttgcttgaggagtaggcgcaggttgagctgcagttgtagccggagtggtagcccctggttgactaacaggtgttgatgctggagctgccttggctggagtaacactaggtgttccagatttcgcctcagctttagctggtgaagatgatgtaggcgcagctgtttgaggagttggcttcggttgaggttgagctgtagccgctggagctttagcaggtgttgttgcaggagctgccttagcttgagtagtagctgctgcactaccagtcgatggagttttacgttcctctaaatgccactcattgtcaaacatggtacagagaatataaatgtcatcgaaattgatagtgattacatcgttaccgttatagatcattttcagaggataaggtttatttcctttacgtttccaaacacatttgtcatcatgtgtgatagcttcacattcaagatcttttagatcatattcatagtcatcatcatcctttgtaactgcacaatctgacgcatctgactttttagagtataacttaactttatcaggtggcgtctcaccagacgtcttcaaacgagtatatgaagatacatctagaggaggtgtcgtaggagctgtttctttggcaggagtaccttctccttcacttactttagcttgtacaggagatgcagtagtaccacctctgggttgtggagttgcagatgcactagattgaggttgagttgtagctgcagtagctgctgcaccactagtaggagttttacgttcatctagatgccactcattgtcaaacatggtacagagaatataaatgtcatcgaaattgatagtgattacgtcgtcaccgttatagatcattttcagaggatgaccctgaccctctttacgtttccaaacacatttgtcatcatgtgtgatagcttcacattcaagatcttttagatcatattcatagtcatcatcatcctttgtaactgcacaatctgacgcatctgactttttagagtataacttaactttatcaggtggcgtctcaccagacgtcttcaaacgagtatatgaagatacatctagaggtgtttcggcagctgtttccttggcttgacctgtagcagaactagttgcagttgttccagatgcacttgttgacccaggagtccccctggtttgactaacagttgtagaaacacctgtctgacctccttgacctacactagcaccacttctgggctgtgaagtttcagatgaacttgattgttgttgcgaattttgagatttttgggtagatgaagtttgcgattgagactgaccagaagcggaagagcttcctgttacgtttgacggggccccagtggctccagctctacctgaggaagaaccaccactttgagacgaagaagattgattaggagaggcattccctgttctagctgttgtacccgaactccctttggaacctgattttgattcagcggaacttacgaagcttttaaggctaaataataagaggtatgtaactaaatatcttaatagacaaccaaggctcatccatgctattgaaaactaaagaaggtaccaagaattgaaataaaacaatccattggtaagagagcccaggaatatctattaaagtcaaaccgttactcgatccatatgtcttagcacaggtggggatatgtattgaaatcaaagttacacgacttgtattagctatattgactataaacaaagttcaacttatgagaaatattaaagaacaaatattggtgatcggaatttaaagtttctttagaaaatggaagtacatcttaagacaattcattccaagacaataataaattgtatcattaaaatttcaagttaactcagaaaattagctcttgttgttttccatattttatgagtaaaaatttctgttaattttgtgcattttccttggaatcgcgtgtataacgtttcaaaaatccccaaacaaatttgataagttggcgtttagcaaattatgacttttttctttcatcttttgttatcgccttaaataccactttgaataattaattaaaaggctatgtgcgtatattttgttattaatcatgacaaaataaccatttttatttcaaaatttacgaaccgaataatttcaaatactgaccatttaaaccaggtattataatcaattttagagaatttggaaggtcgctaaatcaaataacttaaaacactctaccaaaggattccaattaaggagacaacaatctatttatgatcgatcaaagaccaaaaatacacttcataagacttggataatttatagatctttgacattaattttgatttatgaataaaacttgacattgattctatttcaaaatgtatttagtttataaattgttaattaatttcaattccaggatatttacaagggacatttctacattcaaaatcaacaaagattttgttcaatattaagatcttaactggaaagttagatctaaccgaaatatttaattaactacagtataaagaatggaaaacattaaacattaaacattaaaggcaaaagtgaaaagaataatccatgacttattcttccattgtgtttatcttttaacaagaattagtaagaattcttactgatcgaataacacaaaacaatgatatattcaatatatcaacaatactgagttaacaaattcgttaactcaaaacaacaaaacataattttttgattggtttggatattgaaataaacaggtttagtaaaactaatacgatttttattccatgaatgtttcagaaccagagggtggggtagatgttgtactagatggctgttccttaggactggctgccgaacctttagaagtttgcgatgattcaacagcatctgccaaatcaaaatctttagcttgtccagtggtagatgttgtggaagttcctggtttaggagtgggtgttgaaccttcacttgaacttgatggacctagagcatctgccaaattcaattcaccgctggtaccacgaagttgtgagctatctgacgcatgcgtagactcagatgttggggcagttgtaagtactgatggagttgaacgtgcagtgtcaaatggatattttggtccggctactggattactcccgtccattttatgaatcatagatttccatccttctctgtccattgtacaaacgtgataactgtctctcaattttacgacaaactttttattttggctgctgtatgaaacttcttttggatacctttcctttggatcaagtttgaaaactgcagtaccgttatgccttatttcattacagttagcatcttttaggtcgtaaacatattctgaaacactatcccatgtaactgtgtacttggatgaatgaacgagcacctggtcaccagaacgacctattttgtaaattttaacctcagaaggaccagtagtttttgatgatacaaaaccactgaatggtctccattcctgaccaaccaatgatgaaaagtgtacgtattgatcagaagactggacagtaataaccattttggtaacattgaaaacaactgaagttggataatgatctccatacttatctgaatcataagtccacacggatacctcgtcaaacttaacatgggtacacttaactccgtaatatatattataggtgataacgggtcctgtaactacttcatcgtacgagatggtaggttctaaaagtccatcttcatttgttatgtaaaaccttaatttggctgattccctaaattttgttctcgtagaggctttgtaaccataaactaaattccacttgtcatcgtagtatgaaaagtaggtttcataatgcgcctttgattcaacagttataaaaccagtatttaggttcacagtaacttctgtggggaaatgcccttcgtgttcatcataatgatatttccacaccagtttaccatcatacctaacttctgtacattttactccttggttaaatgtaaatctggctaagtttctcgatccctgaaggctataatggttcaggttctctagatcaaatgttttattagtgtgatcaaaggaacatagttttaatttctcgaggttatacctagattcagtaacttttaatcttgcaccgaaggggactagcttccagactttatcttcataagtgaatacatactcatagttagaagaagactcaaccataagagtggaattatttttatataaaagaactctcgtgggatatttatcttgatgttcgtccccgttatgcctccacacctcaactccatcatatttaactccgacgcacttaacatcagcgggaatcttataaattgtaagtgaatcatccccttccttaccgaatgtagtttcttctggtattctgttttcgtttagtttgaaaaattttaacttatcgtgatcaattggatcagaactgcgtctatggttatagcttactggtaacaaattccatttcctattgtagtaagcatatgagtagctgtagtcgtggccagattcaaccatgatataattcttttttttgttcaaaacaagagatgttggatgcctatctttgtgatcatcaagatcatagctccaaacgttaacatcgtcatactttattactttacaattagcatcagggttaaatttgatctggaaaagattttcagaatctttcttttcatacttggattcgtctatttcagcgagttttttattagtgtccgtggtgaataatttaagattattaggatcacttggcctggttttgctagattctgataatttgtaaccataaggcaataacttccacatattattttgacgggaatatacataacgataatcatatccagactcaacaatgagtaattttttctttttgtttaaaacaagagatgttggaaatttatctctatgttcatcactatcatgtttccatggatcctcatcaccatatctaatatgagtgcacttaacatcagagttaaaattaattgttagagcgtttgaagaatataacggttcatatttgctggagtcgagttcaacaagtttatttgggtcagaagtatcttcggtaaacattttaaatttatggaagaaaagatttgatgtcttgaaaccgaagggcagctctttccattgcctattataatatgaaagaacatgacggtagaagtatgatgattcaacaaatatataattttttgccttgttcaaaacaaccgcggttggaaacacatctccatgttcactgtggtcatatttccaaactaagagatcatcatatctgacttcgccacatttaacagaatctttaaaattgtaagtaataagtgttggttgttcaacactatattgattcaaatcaagttcaacaagattacttgaatcatcttgtgtatatagtttcaatttatcaaggtcaaaaacacctgttacatcatagaaatagttaaccctatcacctgaccttagtgatgtcaacttattattttggaattgaaatagttgacgataagtgccaggccattcaagtgctaagtagtttctgttaattttgttaaaggaaagagatgttggaaatttacctttgtattttgtttcgtcgtatttccaaacctcgtcaccatcatacttaatagatgcaaaccttagtccagactcaaatttatatgtagtatcagattccttaagttcaaagtcacttgtatcagcaggtgtcattaatcctaggtcaccaacttttgaaagtctcagtttttcttgttcaatcggatgcgaaagacgtgatttgtaggcaaaaatacatgcgaactttccatcataataagagaagacataacggtataggttggaacactctaaagaaaggaaattttgattcgtattaacaataattgtgtctggataatggtcttcatggtctgtgtcgttataagaccatactgagtctccaccatatttaacaccaatacatttggcaccaggtttaaacttaaatgtggtaacatttccgtccacctttttattatactgggtcgcatcatcagtatttattaaactaaactcattcaaagtgaacatttttaatttaaaaagagataatggttgtaaaatatgtgatttgtaaccagaaatacatttccattcatcacccatgagagtaaaataatattgatattgaccttgagattctaccatgagaaaactagtatttgtgttcaagattacgttagaaggataataatttccgtgaatggatttgtcgtgtttccatatacttttatttccatatgtaagttctgagcatttggccttttcaggaaatgtatagttgatcaagtgagaaagaatttgttccttggactttaattgttctttatcaatttctcgagaagatcctgaatcatcttgggttaaaagtttaaattgttcagagacaatcttagattcggccaaaccagttgcagaacctgaaggtactgcaggaccctcagatgttggatctggatcatccacaagagaaaattcaaaatctttattgtttttatacacgtacaacaaaattttgccaacttggccataattggccacaaccctgggtgaatgaggatcaggcaaatctttaaggacatgagtgccttttttaactttcgaaaacttaaaaccggatttagctttaaatacatgatcatcatctttcttttcataaccgtattgttcagtactttcctttttctcaacgtcaagttctactaaagttgcgggcgcagaactcttaggttcttcttcttcctcctctttaccttcctctttaccttcttctccaccttcctcttcttcctcttcttcaccttctttgccctcagtcaaacctcttaaacttatttctttcctttgatctgaggggctaacaacaatgaattggccgctacgaaggtacagatacactccttttatagttttaaaatttggatcatcgctgtggttccacaaatgtttatcaccaaactttacaaggtgacaatcgacaccatggttgaattcataaccatacattaaattatcaaatgttagtttgtatttgtcaggttttagctgcatgtaagagcctgcatcataatacaacatcttaagatctgaaacttttggaatctttgatgtagcattttcccaatcttttcctggtggcctgtgtagcaatataacgttaccatcggttctgaataaacccaagtatttttcactacctgtaaccatcaaacatgctttggttgagtactcagacggattggtggctttccagatgtctgtgtctgctccaagagtttttgattcaaaaaccttattgaatacaaaactatcttttgcggtaaatgtagtgaagtcatcttttaagaagtagtcaaactcaattgaactctgagtcttggtaatgtctagtgatatcttgttagagaccgaaccccatttgccatctgaataattgagatgtttaacatcaccattagataggtgtactgtaacattcttggtcctctccaaagcactaagaccatcagtgacaactttattggcatacacattcggactactagacttccatatttcgtcagctgcaacacctgtaatcctagaacccttgacaactgcagcaaaaactgcattgccccttgctgcatgtgttttgatatttttctgataatcttgagtaaaatcaaagtcttcagtactgtcagtcttatttatatcaagaacaattgctttagcctttttcatagcttccaatactttggtttcatcatttacaccgatgacatacatgctatttctaatgagatcgagataaacaccctttatattacccaagtcttgataattgtcctttttgtacacttcctttccttcgtatgtaattttactacaaacgtgttcagatttgattgtacatccaatggacatatgatacagagatatagtatattgatctggttttaaagtcttttcaactttgctactttcatcaacgctaaacaccttaagattaaagaatttgtgtctcttgtctgttacgttctcaaatggtttacctttgtcggagtgaaaaaatacataattctgactcgcaagaaacaaaagaagatgtttttctttagtgccagcagtttcctttactctaaccttggttgcataatcattcgcaggtgcctcccacaagacatcggcaccgaaagtttttgatcttactactttgttaaatccaaaaccttgcttacagctgaatgttttgtatactcctatatcgtgatattcaaactcgtttgtactgtcactcttatcaattttgagttctaccaaggtggctttaggaattgttacagatactggttcgattgtattttcagtttcaggagctgcaggagttggttctggtggcgcttcagctgcttcttcaggagcttttaccttttttggtttctttggtttgacggtgggtgttactgctgttgctgttattggtacagcttttttaagtacaacttccttagtaacatctaactttttgctttcgttatcgtagttggtaatgaaaaagttatttgacgacaaaccaagataaactcctttcaacaaaccgaaatcttcatcggcgtcataatcgtaaactagtttattttggtatttaatttggtgaaactcaaaatcatcatgaaaagtataaccgtatgaaaacccatttaactctactctgtaatacgtggagtctatttccttaggggatccagattgatcaaatgtaaagaacttgagttctgataacttgtgtctatcgctagttatgtctttccaaggttgatcttcggcagttttgtgatacaagagcaattcaagattgtttagtaacaaggctacgtggttgtctgtcaacttgaccctaacaagtttgacaaagtttttagaactggcctcagcagcccaaactagctcttctctactataatctgtggccttggcttttagaaccttattgaacccataaccgtctcttgcaaaatatgtagcaaattcattctttctatcataatcaaactggtccgtagcagatgtctttccgaggtcaagttcaaccttagtaacgacttcttcccaatttgcattagcacctgatttgttaaactttagcttactatcattcttcttgtgaatggttagtttttgatcattctttccaactccttcaagttctaccttggtcgcattctcgttggggttggctgatctccaagtaactgtccttgaacctcctgtaccagttgtttccattactgttgtaaactcatgaccagttttggctgtaaaggttgcagtatcacccgatcttttgtactcaaactgattgctaccagcagtagccttaaggtccaactctactcctgtcacagcaggcttaccctcagcttttgtagggtctggagataggctatcaagttccgacttccattcattattctgaaatctaaacataaaaacccgaccatcaaaaagaatagcgaactgtttatcatcactcttatacgatacagattttggatatggttcaccagatttgtgttcccatacggttgtggaaccatgtcttacttcagtcagctggacaccactatccggttcaaatgaatattcaactccttcctgaactgtcttaaactgggaatcatcaagttttactttcttcccagaagcgtcagtggtgaataatccaacatcagaaggaacggtgacagatgatgaggtagtggaactggcttgaactggattagtggactgagatgaacctttggcttttgaaggttcattatcagccgaaatcacaaaccattttccattatttaatagtaaatatataaaataatacctaaataaataacttgttctcattcatcctgacaaaagacagaagacatacctaggaagttaataaaaacaattcagtggtaggaaagagtccaggaatagttattgacctccaatcgttactcgacaattatgtcttagcccaggtggggacttttgatagaaaaattgataatgcagttacatatacaaattattaataaattaaattcatctaaattagttaaactaaatttaacattaaattgagccatattttcatttaaaaatcagttgaatttaaactaaattaaccgaaaaccatcaagcccatagtagttaatttttcacaaaatacttaaaaaaattttataatgacttactttatataagattaaaatattatttatttattattttatgatttggtcttcctaacctctttaaaaattcatacaactacttacatatgtcttatgtattactacatttcgtaaaatttttaaaccggttttatacttcacattttaaattttttattaattttaaaacatttttataagctgatcctcctttattataagcatgtattatcaatagaatcattcttttcattcttttgcatttaccacagtcgtttccccaaatttgggataatagtaaggaatatgatttggaatataataatctgccactgtttatattttccgttatttcttatcaattgtccggtcattaaaaaccaaatttacatcaaatccagccaagcgtgattggcttttgttgctcgttaactctaatatgatttttacctgaatttttcattttctctaagaaagaatttcataacattcaatacagcttctttaacaacaacatttcaaaagatattaacaaatacaagtatggaaattaaatttatgttacacatatcaatattatctttcacctagttgtgtattaacaaacattacaattagaattactaaaatgggtttatttgatctatttatttgaaattaaaggattgtattacattaagtgtcattttgacatcagtttaaaatatcatcttaaatgtgaagtgatttggcaaatctaaaaacaaaaattaaacttgtaatctgacctgtgccaattgaaacagttgccttgtggtggctctccgaactcctgatatacgtgaagtcctaaaaaagaattaaatgataacaaatacctcattctgagttccggatacatctttaaatatttagatatcttagatttaagtatagcccttcctttattaccaagtttgaacaaaccagcgcccctgagcgcttgccaaactttgtcactcatattaatgaaatcaatgttagatatatcaattttctttatattcccgttatatatgaagctctcaagggcctcatcgtctagtgatataagctcaggctttcgtacactttcaaaattgttaggcaacatatcaaattgattgacagcattattgtttgagttacaatcttctaagcctggattagagctttgttttaattgtggcagcttattaaaacagttataatttacatttaaatttgcgttcaaaggcatttgattataataaggggaaaaattgttattgtacattttattattgtattttatgtaagggtcagcaaaaggctcatttggactagaaatgctaccatattccagattataaccatttgaaatataattattcatcatatttttcatgtagttcattgtatacgggtcttgagtcatattgtactgatccaagttaggagaattgtttgtattatatcccatgtagtcgtatcctgccatggtcattccatttaaaccattaaaatatccattgtttaacatattcgagtcccaataataggtgtcattcataggaccaaccattttatcatttgacttatcccacgtatcgtaatgagtttctgtatatgagtcataattatatggagaattagaaactacactattaaaatcttgctcatggttctttttattttcaaccgctggagagtttggatttaataggctacaagtattactatgactttcatcagtctttttattatcttcttttccgtttaaagagtgttttgaagatgtgtggtattgttctgccggatcgaagaataattcagggttatttccatcgttagattggccatttattccattaaggttataagaattgtccttttccaaatagttaaccccttttgttggaaatgcaatatcgttttgataattatcaaggttgttgaaattactcacatattcagtgaaattgtcatccttagatttattttgaggcactatttcattgatacaactattaaaattttgtaggccatagtctccattaaaagtacttgatattggatccactaacccctgctctgttgacatattagttccataacctgagtttacattgggtttcatcgtcattaaattatattcacaattagagtatatatcatatccgttctcatacggataattccacatatttagttgcttcgttttgctatacactactataatccaaattcttttaaagccctgacttattaattcaagtgatttcttttatcaaatataatcataatactggctttaaatcccaatgagagtatttttctaggttttttgttaatttaatactagaatatacaattcggcactattgtacagggtaaattttagattgttttttaactgaaatatttatacgagctaatttggagattgcgtataaagctttgatcaagttacacataaattgtaacttgtgatattcaaacttatgaaagaaagaggtaattatactttaaaccaagttaaagaaatacaattgtttatggttaaatttatcgattctttataagaaacaaaaactttacggattattatgtaaagtaatgaataacaaatatggaagtatgtataaataagtataatatataaataatttgaatatataaaggggaaataaagcattaagtacagatgtacacccatcagcaaataatagtccaaaattgtataatttaagtattttaaactaatattaattttgtttgaatcattttaaagtctaaatcattctgattaaaagaattaaaataaaaatcattttaaataataaaatcgataatgatatagggttggctcaaatacgaaatgtgaccttccaataattaaggggggaaatatcaaattttaacaggtttaaataatacgatgtcaaacaaaatttacgttctgataaaaattagaaggaatcagcaaaaagtttaaataagaaaacttgagtactgctatggtcggtaaataaaaaaggagaaataactcctatttacgtagataactaacctataattatttataaatatttttttcaaaaataatttatataaattcctaaaattaaccaataatcacatacatcggataaattcaaaatatttccagtaacaatctaaatttacttgaaaaaaataacttaaaagagtagaataatacagattgccagaaaacaataaataaattatgtaattaaaactaactatcaggtcactattttctaaattatttactcttaaactttacacattcatttacaatttcaattgtaattattttttaattatttttaagtcaaataaaatgtgtctgtaccataaaatttttatttattgaactgttcaaccttagattattatttgtaattttgtaactattatctcaaatgtttgaatataaaatacactatataagaataaaaaatttaaaatatgaatggattgacttttgaatgaatttggaagaatttttggagtttttggaagaatcggatgatgatgttgattcaaatccaaataaccaggctagagaatccattaaaaatgaacatatcaataaagatattgattacaatgaaatatacaacaaactagttcacgaggaactgtcaaatgattctgattcactcgacctcaatgattcctcaacctccaacaaccaattaaacaaggataaaatcactaatggctccgaagaggcctctggcctgttaactgatgaaagttttaacaatgattcaatttcaacattgcctatagataataccatcacctctttgtcgttaaggtacgttttgacaatttatatcaaatttcagtacttctgacggcaaggtaacttcgaaatttgaaactaattttgatttgtctgagccagttaatatcgcaaaacagtcgaaaattgaatcttctggaaaatcaaaccaacacgatgtaaatatttgccaatgtaaaatagataataaattagtaaaatactccattaaaaattgtggagatcttttcaacgcagtggaacattgcgtacaaatgcaactctcagaatgggataacaaacataagctacatttaattaataaattaagagaatatagaaacaaattaaataactaccatgaagaatcatctaaatttaactctacagatgattcaggtacactggaaagactgatcccagatatctctaaagattatttgaaggcactatccctaccatctacaaccttaatagatgattcacacaataccaagcttagcataaggtgtagacataagctgaccacatcattagagttgttaaagatatttgaagacaggtaattttagtcatttaactttgtttaggttttactcaattgatgactcatctataaatcgttcaacaaaatcaccagggaaacttttaactccaacatgcgtatgtacaagtagtgatttaataatatttgggactatgtgcggatcagttttcatctctgagttctcactctacaattcggaacggaagttttgctcctacaatgaatacgatggattggactcgtctatagacccacttaactggtatgaaatcgattcggagaaaggagtgtcagtaacgtcactcgatattctgccaaatactagttggatcacagtaggatatagtgatggaacggttaaattactgcagaactttaaggtaacaaggccacctaaaggtcattcttcattgaaagctgagacaggagactcaaaaaatgcagatagtagaacatttggattaatggcagacgcagtatcctcagcatttggtggaattaaaaagacaagctcacaaacactatgctctacggatgttttcaacgactccgtgttaaactgcaagttcacattcgcagagtcatacgaagaaatcatttgttcaaacttaaagagtatagcaatactgacgtactcaaaaaatgtgctatctcacaacttaaatgtaaattatttacaatccttgaatgaaaggttggaaaatgaccaagttgtggatatagtgtgtctatcctcgaaccctcaggcaaaatttatcacaggaggagacgtgggtggaatttgtgcaatactgacacttaaaacatgccttgtcttctcaaccaggccaagattatccataataatcaatgtttccttggacaaacttaacaggaatgtgagcgctgactttaaccaaacacccagcgtaacatggatgatattcaataccggaaagaagaatatcaaacctctgttactaatttcgatgggaaatcaaatcagatttattcagtgtaatctgcaaacggtgaaaggagttcctagcatgaatgtttctaatatgggaacaatacagtttagaaatccaatacgatgtataaggatagtgacgagactgatacttgcaatagtggattcaacaaatacactacacatagtacaaattaatttaaacacacttcaaatgtattatgacattataaggagtcttgatttaactgatttaagtactaaaatggagctggggatcgatgtctttgatccactctggctactacagccgagtatcctgtcgacgattacagtgttttcaaagacagttaaaatggtggctaaggggtacaagaagttttctaacctcgtttctgacctatttcaaggaaagaaacatacatcctcatttgagctgaaaaacttcagcatcctcatactagtcccaaatggagttctcggaattgaaatcaactcctggataaaggtgataggggaactgtcagcatcaaagatgttctgtgaggcactttcaataatatacgctttgtcagaagagtggataccaggattatttgacttcagagcatttaaaaataacttgagccagcttattttatatattctgcaccagtcgtcagcccacataataaagctgtcaaagttggttaacgaaacgcaaaatatctctacaaatttacttaatttggattcagaggcaccaaaggaagattactggaacacaaaggttaaaactgacgtttatgaccagattaatactttgtgttgttcaatgatagacatctgtgtttcctcgaggctttacgagccgttgaatgatttgatattcaggtgttttgcaacaattgaccttgaacatgtttttgtaaaatatatacttctaaatgtacacaacaccaggattggattggagttcctcaactctcaaatcatagaaagcatatgcaaaacatacgaaaatgtcttggatagtatgtacactcactttttggaggatcactactacctggaagatgaaatactataccttaaccaagttattaatcccaacttcgcaataaatcttaaaagtaaaacgtacaataattgtgaaaagtgtgatattagtaagttagaggtttgcaatttgatacaaaaattggttgaaaacattgattatggcgatttgggttacttatttaagaagtttaaatttgaccatagactcctctcataccatattatttgtaataatctttgtaagatccagttttactgctttaagaataatgttataacggaaactaacaaggcaataaatagactcagcaggcatttttcatggcactgtctaatttattgtcagtcggtggtgctggacgactactccaatgtcttagacataataataactcacgcatataacaagtgcaatgaactgaaaacacaaatgagtgttatttcagaaaatgagaatgagtctagtaaaaccatagaagctgacgaaacagaaacagaaccagacaacccagatacgcaggttaattgtgaagaagaggattcagatgaatttgagagtgatattagtagtttaaaaaatgaagaaaatgaattaaatagtggcatttcgaaatcggaagttacactcccattaaagttgtcagagaatttgtttgttgttcaggtgttgtttttgacactggagtcatttcttacattcgagaactgtggactcactgagaccatcgatactagcagttactgtaacataatctcatatctcacatccactgaagtctttaaaccaaccttcccaatagactctagaccaatttatgccaggaacacactagtttacgatcctgtaactatacactttgatgagatagaatcacagcagtttgaatatgattttaaagaaccagaatcttcagtgatatttaagctcctgtctatatccccaaggctgttctttgtctgtttagaaaacctgttcaattgctcagataagttcgaaaattactacacagagatagggactaaaatggccacatttaattttatcctcaatgttgtggtttcttgtgtttataaattagaggaactgtttgggtccggatccgctaacatgattttgaagatgttgtcatttctctttctcactgtgtcttctagtacggaatctttttacctaaatttaaacacctcgatcctctcaatatataagttgttgaagctgaagaatgaatttctggactataaccctgatttgaaggttgaagtagattattccaaggatctgatagaccaagaaggctactttaacatcacttacttccaggatgtgttttacagaagtaacccagtctttgaccaggaatgcgtgatgattgtaactccattatcagttgataaggttgtattcacatttctgagaaactttatatattcaatatcttcaaaactaacatcgaaatctgatttgtggaataacctggagttcacccagctggtgagaatgtgcaaggagttcataagctttactagtttctcactaaggttcttcttctatcaaattacaggggattttgacggaataatcaaagaatacgatgcactaaacagagaggaaaacatcttcacatttcttgataaatgcattgaatacataaggtcgagtccccaggccttccctgagaacgttgagcacctgcttctcttggattcgacaatcagaaagaatttcgtaggagcagtaatgaaaaatttgacaattctaatcaagctagacttaaataaagtaaccaatcttttgatacagatattctcccttatggatattattaaaacattagacgccacactggaaacatcacctgagaccatactaaacacactggaaaaactacctgacctccaactactagtgttagacgcactcctaaagtcaaagtcaactagtggaaatatgctacaatttccaaattcttactttaaccgttacctgaaccttctgagcatacacgacaaggctaacgtgtctaatttcctcaagagacagaaaagcctaaatattacctactgtttgaagatatgtaaacagaataacattgaggatgcagtaatttatcttctccttcgagctggaaaccttgaggccgcagttcgtcttctggttctgtcgttctctaacaatattagtaaagacctgagggtatgttcaacactaattaagaccgcccaaagcatatgtcaggagtatgaaaaccaactctcgtatgaaataatagaaagaatgtggttcacaatgttgaaatcgttgattcagtcattaaaatctgacgaacccaaaagtggagttgaacctaaagagggtttaaacaacgatgctgttaaaattaatggatctgaagaaaaaccttatgatattaataaggaagaagaattgaaaaggttggttgaggaaatattctcagtgggagttttaaagtacgtgaagtttccaaatgctttgagagagattacaaagtatgacacaagtctagaaatattcaagaaacctcttcataacttattgtcagattttcaactgcagacttatatagcaaacagtgcctcgacgatgtctaaaacaataatgaacaaggagtttagatcaacacagatttttaacaatagaggcgtagtgattaacaccattggcagaggtcctaagattaaccgaaatttaatatgccaagtttgtaataaaagccttattttcaacttgaatcatgaccctgaaatcatgtataaagataaacatagaggccagaaaccattttattatgaagattttaagatttcaaaccttgaggagcaaatcggattaataactcaggtccccattcaaggcatgaagactaatgttcctggttcctcagaaaacacttcagttaacaaagtatacaatgataggcttagtaccctagtcactaagaagaccaagggttcaaagactttcagttcatcaagtagttttggccaatatccttccctcattcagtcgatttctagagacttatcatatttcagaaaagatcccattatagttttttggtgcagtcactcgtttcatgagaaatgtgcccctgtttcttgtcctatttgtaacatagatgagtaaatgtattaatatatttatttatatatacatgccatcttgccatcatttctagaaatcattaaaaatatacgcatgagtagtaaataataaaataaataatatatttatatgttcttattattaggtgatacagattggatggtactttacaaagtcgttaaagaaataacccttactagggctgttggttagcttcttatcatagccgttcatacactccatcacaccgcaatccaccatatggccgtatctaaagtgtcttttcaagactatttcttcaaaatacagacatgccttacatgtttctgaaatactatctgcacgtactgcggtacatttaatgttcatctttttcatcactcgagaaacatcagattctggatcccttccttccaggttcaaaaccttgaaacgttcttgactgtttcccaaaacttcaacttttgagttaaaattctttgcaaatgaccctgcatctttcaagggcatgtagaacttctggacaacttgagaaaagttctcatcttctgataaaagacactctgcaattgagttatccgaggatccattgtttaaaccttcagattcggatgaggaaggttggttttcgttccctgtgtaaaagatcactggattgaattcatttctatcttcgaaatcggtcctcaaataggagtgaatgaggtggtctaactgttcaggaataagtcttttggaaaaaatgtgattaaatgacttgaaaaaactggacaagtagttcagttgttctgaattgtcgtatttatttcttgtgtacactccttgagattctactaaaaaacaagaaaataatatgtacagtgtttttaaaatggcgttcatttcaaaataaataaataatgggaaaattattggtgtatcgaatagctaaaatcttatttttgtgattaaatagattccattgatgttggggaatgtgtaatataataaatgaaccaaaatcacttactagaagattatatcatatattcagtatctaacaatgttatgaacatatagaatatatcaatttttaagatcactaattcaaaaaacttgaaaaaacaataattatatttaatggagcaaactcagtaaataattgaaattttaaataaaattctatataaactagataaattttaaacgaaaatatatgtttaatgtgtttttggttattattctggtaattgtacttatctacgttgaaatttaaagagtttatacttatatatctcatagggtccaatttattgttaatataatctcacaattaagggtaatttaattatttcaattgataaattattaaaattggctagaaaaaaatattttaattccccatagttaatttagataatataatttctatttaattacacactatcaatttaaagtataattttattatattgtatttttttgtagattatgaataacacaattccttcattatatcttcattatatgtaatttttaatccaatggcacataatattagattctgtcttcgttttcatagataccttaacagttttgccagaaataaaaaattttctagattctattctgtccttccaacctgtaaatccgcctttacagaccctagtacgagatataccaattgttttgttttatcaaaaagttctgattttaatcctttgaagcttatcggcaatcgttacttttcaaaaggtattttaacttaaataaaataattctttagatctaaaggttattaatgttcctactctgggtgattctattagtgagggtaccctgaccaagtgggccgtttcagttggagattacttaaacgttgatgatctaatagctgttgtggagaccgataaggtctcagtcgatgttaactctccattttctggagttctaaccaagactttttcgaatacgggtttgtttattaatattctaaattcatgcaggagatacaatcctggttggaaagccacttgtcgaaattgatttggctggcaaaccttctgacaaaccgccagaaaagaaaactgaagataaaccacctactcctgctcctagtaaacctgaaccaaagtctcctgaaccccctaaaccgtcagattcaaagccagtatcttcttctcaagtcaaaccacccactcctgtacaatctaaaccactaccaccacttgaaaaggcttcttctttgagtatggttccaccaactcaagtcccatcttctgatttagaacctgaaactagagtacgttttttataaaataaacgattttaggtccccctgaccaggatgcgtatgaggattgccgaacgccttaaacatgctcagactgagaatgttatgttaacaacattcaacgagtgtgacatgagtgagttaacgaaggtcaggaagatgctaaatgagtctggcgaagtttcatgcaaacttggattcgtctctgccttcatgcgtgcatcaacacttgcgctcttaaagatgccaattatgaattcatgtaattcattacctattaatcctttaaaattaaccattaatccttaaatttaactataaacataatttttacagatattgaggggaatgaaatggttacaaagaactatgtcgacatttcagtcgctgttgccactcccacgggattattagtcccggtgataagaaactgtgaatttaagaattgggaagaacttgaacttgtaagctttattaaaattaggaaatttccaattttttacaataacatttccataaatttatataataatttcttagtcacttctggagatggctaagaaggccagggagggctctatcaccatcgaggacatgactggcggcactttcactatctctaacggtactgtttttggatctaaattactttaggtggcgtttacggcagtctcttgagcactccaataatcaaccctcctcaatcttcgattctaggtaataaaactattattcacattttaaatatgcattttgtcttatctttttagggatgcatgcaattactaaacgtccagttgttcgtgatgacaacatagtaataagacctgttatgaacgtcgctttgacctatgaccacagacttattgacggcagggacgccgttacttttttgaacactattaagaagtttatagagaacccatcgcttcttctgcttaagtaaaatttgatttacacttcatacctaattcatctaaacgctaatatcaacaatagttaatgtacatgtattttctatatgtatattgatttattaatgtatttgtattttgtatttatatgtattttgtattatgtatccagatactgacaatgtatattgaaggtgtgtatgtaacaaatatacaacaaatatatatacaaatatgaaccaactagtttagtatgaagtgtaaaatttaataaattgataaagtagtaatgggattgggtgaaaaattctactaaactgaatcctgaaccaagctggcggaactgctcggcggaggaggaatgttaaaagaccggtaagtcttatacgaagaaatagattttaaaaactgtgaatcaacctgttgagaaaaactagagtacttgatagaaagcaaaagcaaagcagtcttgttgttattaagctgcatgtccatgagactggcagtggtggtagcagtgtcagtgtgttcaattggaaggtttggaattgatctaatagtgttcttggtgccgaaaaactgtctagactcctttattgatcttagaaaggatttcttgtcaatcttcccgctaaaatagagtgtaatagagtccttattgaaacaaagagttatttctgggtaattttcaacaaaatacaagaggattctgaactcatagagatccagatacagttcatccttcccatacttataattgtaattatctctacctgaggtgtgtggtttcacactgttgttaatgtggattaccaacgagtctttaaatctacccgaagttgcatgaatgttagacttgattttgtccagaatcacctggcgggtattccaccacaccttgagctgctgaagaaagagtctttcaaactgctcaatttcatcatctaaccactccaacatcggagtagttacgagttcttcgttatcttcaaagttaaacaaaaatgtttccttgatcgttctcctttgaacaaagtccatcttcttttgtaaaagggttctgacgttgttttcacccaactcttcactgtctgcagtttccgggttctcgtcagataattgtttttcatattctacatgatctggttcagactcatgtttcgtggtgggtttcatctgggttttaatttccgggaattcaatcttggtgttggcaacaacatatattaaaaacagctgtgaggaatcgaatttataggtaatcttggcgtttttgtaaagcgagttaaccatctggtggagtaaagtcctgatgtactcattcttgtcagtaaacaaataataactgtactttagaacatcctctaagacataatcgaacacgtcatccatcaatggtattgtaggattatagtccaaaagtaagtgtgataataagaagctggcctttagggaatgtgtttcatgtattttctttaccatttctcttactggttcaggtctacttattctggtgtacaacatctttaccaacttgagcagattttttaatctctttcccaattgaacaaaatccctcttcagttcattttcaaacattgtggccacttcttcacacaccttctcaagtcccaatgttggacataaatctagaattctcctaaactgtccctctttaaccaatacaacaatgtcatcttgtgtatcttctggggtcttatcaacactcgagtgaaggtcaaatgattctctgttctcactagatgtaaagtaatctctatcactatcttccatgcgcaacttagacatatcatctacacttctcagataatctttatcttccagatggtctaagtccttgaaatctgtcattagctggttcatgtcatgtggctccttatcactttctgttaactcatctagaatatgctccaaatgctccttcttttcaatttctaataaatcatccaagttttcgtcgagggactgtttcatcattgaatacgcgtctcgcttatcttttccgaaataggactcatcttcatcatctttaaccttttcttttttatctttagtgggttgaatttcttgatctgaatctctttctctatgttcaataacatccactgaactcgtaacaggtccactatcttcatttttataatcggcaatgtcttcgtcatcgatttgtgccggttgcactctttttgagaaggtgctctttttattagagggtatcgcagacttcgttgactttctcttcttcttcttggacagtttgttaaccaaatccggctgatcctcttctggcttagaccatgtgtcactgtagaagttgttagtttcgggtagcaattcaagagcttcaagttcagtaagttccttgaccaagttcataaataacactgactccttaaacctcattgttgctggggagtctaccgttctcttaagttgtgttataattacatctcctgatctcttattaatcttctttatcgcgcaactccatctacgcacattctggacactccttactgagcattcttctaggacctgatacctatccacatcctcatccttattggtccaattaccctggttgcttccgtcttttcctgtttcatttgatggtaggtatcccaactccttgattattggcagcagccactcaaatatgtactgctggagttgctttttagagtcacagacaattgctcccagacacaccaggtctactgtatccacacacatccacttgaatatgagcagtgggtaatctgaatcatcctggagtggaaaccatgtacttgctccgtttagataaaacgatgaaggaccgccactaataagtaccgtgatgtccggtcctcttgccttatctgggtttaagtaatagctcaagtccattccaggctgcatgtacacaaatttcttccctattctaagcgaatgtatgtcatttttgagtgcataaagcatgaaacaatctcctgcacatggcctccatgactgctttattgggcattcattttcgtatggacattcattatcacatatacactttgattttttctttggcttatttgaccctaacgttaacaactcgtctgacatttgtgcgcttatcaacttccttattgcccagtacagatgacacacttttgtaggagatccattgtatttatagtttacaaacagtctttttgttggaaccaccttcgtctcacacgagaacccttccagtccaaacaagtcatgtgttgtcaatattcctatttcaatagagtttttcaccttattcgattcagactcattattatctatattgaagtttgttactactcttggtcttcctgaatcaccatcttccagactgacgtctgaattatccttttccttactaagctttaacttatcaattactttctcatcgtcaggcaagttattcacttgttctgatctgcttgttggtgaatttggccctgaaccttttttctgattattaaagtttagtattgtcaggtaactcaacgacgtgtttaggctatgcttgtaggggttcgcgttattgtggagttgtgggaatctttgtttttctaggaagccgtctcttttataatagaaccttgccaccgtatttgggttcataaataacgtcggatcacttttatatgccaaaaactgatcaaatgatatttgtttcagcttgacgtccagtggtggtattatgcacgtaaccttctccagtgtctgtttccttggctttactttcttctttttcttgtcatctgactttaaacatagttctgaaaggtcctcaatcagtgactcgttatatgcctggagttgtgaatttgtgaacattgacaggtctgccatctcgttagctatccagaacgggagtatgtatcccgtgtatccgaaattatacctgcattcatgacccaaacatacacatccctcgtgtgaacacaagtgcatattactgtttatattcccgcatgagtttccacacttgagattctcagtgccgtttgaccccggttcacctaggggttcactagttgtgcttgcgaagtctttagctgcgcccaacgtcttatcacactcgtacttgatcgcttggactatctttgctatgtctcccactgtgtatacgtagtcaaaacagtttggatagatttgcttatccacatcctgcatgtgtaccaacatttttgtcaacaagttctcatagatattacacagataatgtcctatccctttaaaggagtctgtgttaatattgtgaattccatataatttcaactcagaatccgacaaatctgacaaactagccttttgattaaatgcctcttcattccaaacaacgttgtaccccagcttttcaacctcttccacaaagtttatcttatatctacgctccagataactcctcaagagttcatgcggtcttataagcgggtatactagtacatggcaccttctcaaatagtttctcatgtcagcgacagatggaattttgtatttcttgctaaagtgcttcatgatatccagctcatccttcggtgataggtcatacttggtgtcaaaatggttcatatcttcatgctccaacaactctgagcaacttcccagtgttccgtcaaacacaaacagatccttacagtgtgctcctggaggaattaacatgtttctaaagccgcctgaacccgagggacttgttgaccccttattaaaattctcaattgagcatgctttgaggaataggatggttctacagtccattgtgtaccttacacatgcgtcccatatgcactcaatcaaaaacagtgctgatctctctgaagttgacttgaactgtgacatctcgcttcccttatctcctgcttcaaacttgtgtgggttcaatatctgctgaagtgtcgggtgtgaatcaaactcatacttgaccagcttgtgggacactatatcatctgggttctgttgcgaacttgtgcttgatccattattctgaatattactcaggtactgttggtactggagctgcagttgtgttccttccagcaggtgctgtattggctggacttcaacttcttgtttcttttcctgcgtcttgttcattctctttgcttggaactggagtgtcaggtttctgcaatctttgcaaaagtactccaggtgacacctcagtatctggatgttcctgaaaagtattgttgctggttctgacagataaactttaagcccttctcctgggaaccttccgttctgcgtcaacaacattgccggcttgttgaggcatgttttacacggacatccacatgaacacgaagatccattccaggaataaattccatttgatgctagattttctgccatttccttgaagaacatctctgaaattaagtgtctaaactcctcttcgaacaacctttctcttttctgcaaaaagttaaccaacagcttcccgtccgctggggggataattccgtttaacagtgccgtgttttctttagatgcgttaaaaagccagttcacaaaaggtccaattgttttcagtctgtttagtctcctcatcacatctctcttgcccacagacagttcatactttaatcttctctccttttcatccagacccattaggagtgtgtgattatatccgtgcatttcacagcatgacgagagtcttgggtggttctggcctattcttctcacgtggacaaaatcgtaaattgaatctacattttccttcccgaatttttctattaaatcttcttcccttccaagttctttagggtttaaaaatcgattattaaactttaggtctttagacaccgaattatccttacttgaagtatcactggatttattcgaatcagtttctgcctttgaatgattcattttatatttaattgccagtagaatatcctgttcacatactcccaattctgtcaacgttccgtagtacaatttcgggttccactgtttcaagttccctatcaggtccacttctcccacttggagcatatctatgtagtcttctgctatgtaaactgctgagacacaaaagaagtctctatggcacttccactctgtgaagtccatcttcgttgtcaacttttcaaccttcccttcactcattctataccaaggcccgtcctcctctggccttaaaagaagtgtgttaaaactacttgttccctttcctagtccatcatatctaagatctccctcctttattatcagagcgtacaatgaataccactttactgatgtgtgttccttttcgcaaacattatcaaattctccgaaggtatcatcttcgtcttccgaacattcaaacactccgtaatcgtcgtagttgtttgtatttctactatcatcactcatgttatcgtatgctgctgcggactttattgatgtgcaatctaacctcagcggaacgtcaaacagttctcccttcttcgcattcttagttgggtaaagataaaagaaaagcacttgtgggtatctggtcattgtctttggggtagcttctaatgctttttgtaaagagtttgagtgtttgcatcttatgtaaattgtggagatatcatccacacttggtttacggaacaaattttcattttctggggaccctgagaataaaaacttacatgttgactctaaaagcgtttggtctctcatacataatggaactgtcttctctccttccttcttttctggatctggtgggtaagatattgattcactgctgtttgactttattcttctctgtttcaaaactttcttcgcggatgccaaatctcttaaaatcatcgtgaacatttctgaatgtaaattcacaatttgatcttgtggctccatcgtctgtaagtccgtcatatgcattgccttcaatattggtttcaggtttggtggtggaggcaatagtttagaaaatatatccggtctatctcctatactgtggctcaaacttcctggtacaagtctgtatcctcctttatccaattttacgttttcttccttatttttagtagaattagtttttgattcctggttgttaacttcccattcgtatcttccgccatcgaatgagcagcagttaatgcttgggtgatcatgactatcgtgcattgattggcaatcttctggctgattattttcagaactttctccattactactattatctttgtttatttgcaaatattgttgtttgtacttgtaagtcgactttggcaccaactcgtacaaataatacttggatattttcgggttatcaactgctgagagtttatacgttctacatgaaactgctagtgggtataggtacatgtatgcaaaaaccctctgaagcgccaatattatacttgtctcttcagtcacgtctgtatcaaagtcatagttccacatgaggatgcttcttctgaactccctcaggtggtataaaatatgcaccattaatgccaaaaaatcactatctaatgttggcgtaattgccggcaccactgagtctaaacacttaagcaacattacatctgtgatattttcatcttcactatcaggagcagttgtgtgattaggggtagggttactattgtttaccaatttgttgcagatttctgagcaaatctctctctgtgctcgatctggtatatattcccacatcatttgtggttggtacagtattgatctggaccacagagatgagtacggaggttctgcctttcctctaatcactactgttccttcatcgtccataaagcctgctgctttagttagtcttgcatgggatatcatcttttgccatcctctcgacgttgcatcgcttgaaaagctccaatgtgcccatgatgtcaccgactgctttggatccttaaaattgactactgtcagttcaaatcttacatttgggaacacccaatactccggataccagtcctgaactactgcctccacaaatactgataaatgactggactcagaatccgttcctgctgttcctctcggatgcaacagcagtctataatgaaagccttttgagcttccttctgttggtgattcgatatcgttttgtgtttttgcaattctccaaaaggttcttatcgcaaactcaactcctgagaatccgtcatcggaaagtgttgatttggagtccactccgtgattattacacatgtaacatgggcagtgggtatcgtcttggtagaaacattcttggttcatacattgttgccgagaggagtccgaagttccttcatcggtcctttcttgggacgaattttggcctttgttagtattatcgacttcagaagccatttattatattttaaaattttaatttattataaattacgatattttgaaacctaatctggttttcaatttactatattacacaattactataaaccagccaaaatttataaatttatttcacctattttcatcttacagtttattgattttaaaaagatcaaatttggttccataaatcccaaattaaagatcttttaattcccaattacggctttaatagtattattctcattaaagctcaaccaaattagttcataagaaaataaatctatgcattgatcctattatatatatttgtgggcttattgttcctcatgtggtattttaaattcaagttatacaacatcaaacactaagaatagagcttaaatgtactatttttgcagatttttgataaaaatttcaaaatttcatatccaaaaaatcaatatgtttaataaataagtgaaataacgagtttataaattttgagagtgtaaaagatggtgtttcaattttcctccgggttcatggggaatgaatgagaaaattacaagattattcatctttaatattacaatttacccttgctaatttattttttatttagtttattcttattttattcagtgtttcatttttttgtcattattcttatttaaagaactgtaaatttgtgtttaatttattttttcctttattttaactatatatacaggtacttgcaatttctatacaaaaccattgattaatatccaaaaatatctattccttaaagaattatataaagtgtgaaggatgagatggtttattcaaattgaaaaggtgtaagttacaaaataacatcaaaatactacattataatttacaattgaatttaaaacagtaacaaagagttcacatacccaaatcccgctcccaatcctcctcctgttgcaaattctggtttagttcttgccaaatatccattctgttcattagctatgcactcgtctccatcatatattgcatagtgatacactccaagttcggttagactattatgacccttaacttcaaatgacccattcttcaagttccttacaaacaaggctggttgtgaaggcggtttaattttcttcattaaaacatattgacataactcttctttgttattcaaaccggctcttaacctctcggaaatttcaactccaaatatgcaggcggatccaccttcgccgttgtttttaagtatatagtcagatgggttttgaatcgcatcttttacaacatgtaaactcgattccagtgatggatcgacttgtaggatggcggtttgcttaacaaggtctaacacatctgcgttcctgttgacaccctaaacttcattaattatataaatgtttaccttaactcttttattgtataaagatactaatttttcagtgttttctggtttgctaaagtacatctgagcacgtttagtattgacaagttgggccacagtcgttgggattttaacagcatctgaaaattcaagaaattttctcatcaggactctttcttctgattccataagctttgggtcgtagtagtctctggaatacactgtactaacttcaaaacaatcactcctgtttaaacggtttaagcctggttttgagcccattattattaccaatctcccaggatgaagtttaacggtactatcagcatactttaacaatttgactgttccgtcactattgtattcccaatccctaaccagaagaaaaattctcttcttcatccattgtatcatttgtctaggagttacagtttttacatgaacaccatatttatcaaacacatcattcgccataaaataggtatcatagtaattgttgagattgtttctaacaacaaggaacacgcaaactctgttttttccaaatatgggattgtatctatcaagatacattctatgcgattcatatatcgggtacgtgaaacaagtatcagggttattatatacgtgaagtttttccttctctaacaaaagcttctcagcatgtttatcatccaaatcatgtaaatcaataagataggtatttagcagtttcgcatggaccctgtgcattagtcctgaaagatatgatacagaagatgctgtgttgttaaattcaaccaacttgaattccaattgtttgttttctaaaataaattaattaataagaaagtacctgtgtaattgttggtttctgaaaaatgacacagacaatgattataataacatgttttacaaaattcattttcttgtgttttattctttgtaaggttatcaatgtgtataaagtaatcggatctgcatatgtatgttctgaggtcatctttgatatttctagctccagaaccataaacctcgtttgaaatctggagtaagtctctgacaaacttatcatacttcagaagtggactgaaaacatcattcagtaactcaaggtcaacagacatttcatcaactatctcaactagaatagtagatgttaaacaacaatcctcgtagcattttagaggaaatggtaatgggaacaaaacaaagtttaccatcgtaagaatgccatcataggcctcaagttggaacttttccgatgaattttctggcaaattatttattagttcaaatttttggatcattcctcctttaaacaaaaaattccttgcagtgtcgacacatatttcaaagttctgctcgtttggaaggagagtgtagtccgatggaatcttaatcttgtcagaattttcatcaactttacagattacgaaactctttagaagtttggccaattctctaagaaaaatagtcattaatactagtataagtgggattatcagtgaagaaggacgacaaaatttaacatacaattattagtttcattgtatatttttttactatttacgattagttttttgtgtttggatgtgtgcttgttttttaggttttttagtctctttgttctctatcaggtatattcctcaggacccgatttgagtgcattcgctgggtgggtttgggcaaaatgtcccgctcgttacttacgcagtagtcgtcgcatcacgcaccaatctttcgccttttactaaagattgccgtgcggcgtctacatttaatgctatttatctaatttttcttggcgctcaggcgcctacaataataaactcaatctttctatatattattagctatatttatctatacatttacaactaattgttttaaatcttcatatacatttgtttcttcagtctctaatttaaattatctaattctgatctcattcattagagattccttatccgcatagtatttagcccattttaacactgttttttcacaggttccaaaatttaaaccagtttttctatttaaagatttatataaatatgaatgtattttggctttatagcgtcaaactgacggtacacatagtgagattctaatctaagactttaaggaggaattaatttagtggattccaggtggaatggaaacctaatccattgcaatatatttatatattaaaatataaatatttatatagataaatatagataataatatatagaaaaattgagtttattattgtaggcgcctgagcgccaagaaaaattagataaatagcattaaatgtagacgccgcacggcaatctttagtaaaaggcgaaagattggtgcgtgatgcgacgactactgcgtaagtaacgagcgggacattttgcccaaacccacccagcgaatgcactcaaatcgggtcctgaggaatatacctgatagagaacaaagagactaaaaaacctaaaaaacaagcacacatccaaacacaaaaaactaatcgtaaatagtaaaaaaatatacaatgaaactgtacatgttaaatcagtttactgtagcttgtcaatgtcatgcctgttatcaatgtttgttgatctttacatcaactttcttgaaaattctagaacacaagaaaataagttaaagataccttctcaatataaacttaccaatagcacttctaattgggatttagccgtagattgtgttaggtatttagtgttcaatggaggcctgtaccaggctcggggcttaattaccaatctctcaaatgatttgagagaaaattttcatttagaagcgtatgattctttacttgtaatggtaaacttcgtcttgttcccattaccatttcctctaaaatgctacgaggattgttgtttaacatctactattctagttgagatagttgatgaaatgtctgttgaccttgagttactgaatgatgttttcagtccacttctgaagtatgataagtttgtcagagacttactccagatttcaaacgaggtttatggttctggagctagaaatatcaaagatgacctcagaacatacatatgcagatccgattactttatacacattgataaccttacaaagaataaaacacaagaaaatgaattttgtaaaacatgtctatacgataaatgtttatgtgaatttagtagaaaaaatgatactaaaggtattgtttcaattattaaattattttcagacggccacgtggcgtacaagttagtcgagataaacttgggggcttgctcattatcgaactattcacgcaaattatacaaagtacacgataaactactacggacttatcttattgatttacatgatttggatgataagcaggccaagaggcttttgttagagaaggaaaaactacatttatacaataatcctgatacttgtttcacatacccaatatatgaatcacatagaatgtatctcgatagatacaatcccatatttggtaaaaacagagtttgtggagttttaattccagatatcaactttttcaacttttatgacacatatttcatatcaaatgacatgttcgataaatacggagttcatgtgaaaacagcaacgcagcctgtgcttatagagtggatgaagagtaagacttttttgttggttagtgattgggaatacaatacagacggaactgtcaaactattaaagtatgccgattatacgagtaaacttcatcctgggagattggtaataataatgggctcacaaccagacctaaaccgcctgaacaaacttgaatgttttgaagttagtacagtatattcgagagattattatgattcgtctgaaatggttactgatgattctgtgtttctaagaaaatttcttgagttttcagatgctgttaaaatcccaaatactttggctcaactggtaaacactaaacgagcacagatgtacttcaccaaaccagaaaacattgaaagattggtatcttcatacaataaaagggtaaaggtacggacttatatatttaatatgctttagggtatcaagaggaataatggaatgatggacctggttaaacaaactactattctacaagtcgatccatcactggaatcgagttcaaatattgtaaaagatgctattcaaaacccatctgagtacattttgaagccgaacagagaaattggcaaaggcattttgtttaatgtcgaaatttccgagaggttaagggccggtctgaataacaaggaggaactatgtcaatatgttttaatgaagaaaattaaaccgccttcacaaccagccttgtttgtaaagaacttgaagaatgggtcatttgaagttaagggccataatagtctaactgaacttggagtataccactatgcaatatatgatggagacgagtgtatagctaatgaacagaatggatatttagcaagaactaaaccagaatttgcaacaggaggaggattgggatctggtcacggatttgttggtaccctgttattatattagggacttaatgtttaaaatttaaccacaatgggtttaatgttttaattttaaagtctgttttgttgagattcttaatttcaactgttgtaatatcttattatgaaggttatatcggaaatatttaaataaaaataattgtttaattatttaaataggctaaaatctgaaatttggaattgtattttattttttacaatattttatggtttataggggaataagaatcctgaaaataaatttagtataaattcatgtcttatacaatcctacagttagaaaatgataaagagagatcaaaacaattaactcaaagccatattaattcagtgtgcattgatttcgtaaaatcgtaaccccagtataatgatgtacagaattgatatataatgattaaatgcaagatgtgtatatattagaagaattaatcgtttattaggaacaaaattttgtgttattacgcaattttataagttttctaatcacattatctggattttgtgttttaaattttaatcattggtgatttaatagtttcgatataaaaaatcactctagacatttttatacgtcaaattgacgtgctttatttcatatttaactatttttttgattttcgtaaatgaattataatttggacacccattcttcacggatgacacatacacatttttgtatgcttgaggtttcatgaatatataaagcagaatgaatttgttaaattcatataaattgatatactacattttcattcttttatttcgatttggaattaaatattccaaaggaactgatgatctgtccaattatcgagatgatgtgcggatcctagacgtcgaccttgcgaaatcaggttagaaaaattagttataaaaatctttattttagtccattgtatcgattttgagaaaaaagcaatattacaatgtaaaccaagacatgtgctgattgttcacgcagcccagtggtccgatgcatcatgccttgagaaaactgatttcgaagctaagcaaacaactgggaagaattatcacttttttgacagaactgaggttttgaagcagctatgtgacgggttttcatactgctttctaaaaccctctaaaaccaggaatactgaagctaatcacacctttctaggtgatcctctttactatcatactctaactagtaccactaacgtctattctttaacagtctcagtctcttgtttgaaccgcgaactcacagtcagaggaagaaaagtaacagacactatcgttaacaaagacaagaacgttgagttcggctgtaatgaagatgaacagattcatttatccgttacaagagttgatggatacacacaaaacgggcctgatcgctcattaacctttttcaattttggcccagaattattcggctgccatttaaaacaaaaatgcaccgttacaactgaacaactcaggaaatgtgaaaccttgaaggaaatgtcttatggaaccggactattggtttattactgtagaagtaagttttacaattaattaataaactttagagcccttgagattctcattttgtgatcatgttaaggtaacaaaatcaggttctgagaacgttgataaatttgttctgtacgcagaacaggactcccaagtaagagtcaaggcaccaatttttactgtgctcactactgattcggccgtttggtcaacttatgataagttaactgacaatgaagtaaaaaaggatcgcaaagaactgttgagattcttatgcgataatcgcaattattgtgcatttagccctaagcgctcagccgctggccctcacgagtcttcttttgaagaagtacatttcggaggaattttaaatgagacaaagccccttgttctccttgcaactttttacacaaaacccttgaaagagctaaagaatcttgctaacgagggtgtaaaaagtgtaaaggtgaacctgggagaaaaactttcctttgcttgccttgaaactgaagaaggcactctgcacgttctttcagctgtcgctggccccaaagatcaaacagatgtagataaccagacggattctgttaaatttaaggatctgactaaagttatgtataagatatgttatcgtagaaggagttgcgaatggaacttaaatccacaaccagtccacgaagttctggaccccaatagtgtaacacgttctgccctggaggtagcctatttgttgcaaatgtcgaacaaaccagccccccagagacaggaaacacaagcacaagcacagagtgttctcccctccggcctggcagaacaggaaattacagtcaagtacatgtgtaaaaagtatacacatgacccaagtctggttgatatgcccgggcagaaagtaaatttccttgaaatgtcacaggatgaggtacactcattagtggataaggagcaggcagaaactgtccaactaactactaacacaaagctgtttattaatttggaggtgtttgggaatttcaaggttcatgttggggactttttcgagatagatgtgcccgggggtactactaacacagtcaacgctttctttctgaataataaggagtctaaattaacccaaaatttgacaaggcaatcaacgaaatacgttttctatttggggtttgccaagggcaatactcttgagttctcactggacgcctctgatggagttaatagcgagaaagtgactggaaaggtgaccgcagcttcagatttagtatatccaatttcattaaaggatgtcgtcaaggcaaagggatcaatagtaggtatgcgagtatatcttgtaaaacataatgtaaattaaatgcgttatgtgctagcaggtacggtgggagtgtttttggcctttagtgcctcaagctatgaatttttatagaaaaattaaaatacctttttacatttctcctcaattttagactgcagtgttgtaattgacttgtcaacagtttctctgaaaatgaatttggagaaaattggcttacatttcagtgttaatatattctaaacgctttgagattgtgctcactgcatcttcctttgtctgagatgttaaaatcggtccagttgccttgaaaatttttgtatcatcttccactagttttatctcctgaaccatcaatttcataaatattagttacgtttagggcagctgtagactcattctgttgagttaaaagttgtgagtggactattgtctgttctcggtgttctaaatcaagtattagtttaaaataaattttataattagcctactttcccttagggaattgatttcatttatcaaatcttccattagtcgatttcataaaaataaattaattaaaataaatccattaattagtagcacgaataatagcttttaaatataaaaaatgtattgtgatagtacattagtacacaggtagaatagtagaatttaaaaacattattcttttagtttgtaatatccgataaaaaatctgatttatagtttatttctaaattattgtctttgaactgcgattgaaaggtcttcgaatatcttattctgctcttttgcctttcttctcaaatcctcaaataccttcctttgcttatccataagttccatagtttcttcctctaactccctcaattcatctttgtaaaaattataaaaattcgaatcattgtttgcggattgatttatttttattgatgggtatgttgagggaacgacatcaccagtgatgttcccagtcagtatgttggctatttttgtggattctaaataaattaaaattaaatactattaagttttattgtaaacacacctttgtttcctacacattctacgattaacactccgtttgtgatcagattaataatctggtttattaaaatcgcctttagaattctaatcatccaggaatttaagaaaatacacccaaattccaacattataatttataaaatacacacaaaatatataaaatattataaagtgtgtgaaactttaaatgtgtaggtttgtaggggacacagatgttcacttaaaagtttgccataaaactcccgacaaaattatcaacatagtcgtttacaacacaccgttctcctgagatgccgtttataccgttttgatgtgattctgttctatatcgcctataccatgtatccggatatgaaagtgttgtctttgaaactacgtttctgagatcatttacaacattctcaaatttcttaatagtattagcgtttgatattgcggttctgatatcatggtgctgattaatgtacttgtaaagaattttaaatgcgtgacctttgatacagctgattttttgtcttggggatctagaaaaaacaataaaaattaataaaataccctttgagaattgataagtactcttcgaatatgtcaatgttattatatattttccctgagaaaaggtatgggttctcaagtatagcttcagacgacattactgcgtcagcactaagatacatttattgtcagtgtaactaaccctgtatattctagacatcttttaacatcttcaaaggtttcaattcctccatttgcgattactgaacagttttaaatcttaattattagtttgtgattaccaggaatattgacttttgatttaattatcttaattgagtcccaatcacactcacttattctcgttttagtttcgcttctatgtctgccgtgtactgttaaggccttacagccactcgcctaataatttttctaacttaataattacaaacctctagtgaatagcacaaatttaatgttgactgtaaacagtccttttctacttttctaattttgcaagttacgtttatcccagtttgtgtcagacttctaacaatttcactaaagaaaaattatgttataaataacttactttattaattgaggatattccagcaaaaatgagccatatcttccctttcttgcaatcccctaaatccaaacttactgttaaaattatttacctgtgggcatcctaagttaatatcaattgcagaaacatcgttttttatatatgatgatgctaaaataaaggcgtttggatcatttcctaatttaaatttgaaaatatcgagttaataccgcaaaattgagcaattaatggtttatcatcactagatgtgtggaagtggatattgcgatagttttcattttctgagaaaatcctaacaacaattaaaccgttaatattcttacttagcgtgtaacataggagtgtatgccagatcggcagagtatcgtctacatagtagcctacagaattgctatttatcaggtgttagggtacctaaatgggagttcactctgatcaaccattggggccactatgaactttgggctatttattgacttccaaaaggaccacgggtccatgctttcattcgataaatcagaaggttcagtagataacatgttatattacaattaattatatattacaagaataaaaatacattattgactaaaatacatacataaaaaaacgaataatgtttttatttcacttttatatagaatcttcatttttatataaaaaatctacaataaattcataaactagtacctgatatcgccaacttaatcacttaatattttcaaacaataataatttatatataaaaaataaaaaatataaataagaaataatcataatgaataaggaggttctttttacaatttaaattgagatttttggtaagtttcagttactaatcaatattgatcatgaatttacttaaaataatctttaaggtccggtatttctcccaattctaaattctctaacatttcataatctattccctgtagagcgtaggcatacctattaaattattaggccgacagaacgaaaacttacgaaagtctgtttagtttcctgttcaatgaatgtgttcttctgaaatatcctcttttaacaaatgctctttttctattctttgtatcgtttctaagtttattgaatagatatcgctctcgtgtgtgctcatcgatgtatagttgtactttattttcaatgtagttcaaaattgagttatttatcagcggattcttatattttatattatttacgtattgtggaaggccaattggataagatgttaatggagtttcaatcttctaaacatataattactaagagtattaaatgatgaaactacctttggaatattactatgaattgagacatgattattgtttaaattctcgatatgaatacgatctggtgtttttataagatttactggagaaattatgcttgatagatatattgtggaaggttgacatacattaagtaataacctcctgttaaaggaacagtttttagatataattgccgagatactcatctaaaaatgattaattaaatccaaaaagtataattaataaaattaatattaaataagcatgaatgtgtggatgaaatgaatacacaaaaattgttaagagattaaaatttaaataaaacaatgtcgatagtatacggaagtgcttcgtgttctttatatagaatggatttatcatttgctaaaccagaagattcatttccatccaacccaggttgattattatcttcattcctttcatgggcaattttttccagaactgaatatacatcttcgtgtattttagatgtcaaatgtgttgtttcatccagttttacatcgtcttcaactttattaggctcaaaaataagatcttcggtaaagaatttccttctcttcccagttgaaagtatattaaaatgatccattagtgagttgattgatgccagaactgaatattcaatactctctaatcccctttcaacatagtttaaaacatgttgaagtatacaatacagctgatatattccttgaattcctatatacttggacaagaacttaaattgatcgtgatcatttgtaagttcttctctatagtttaatactatattcccaattttaaatattggacttgagggttcattttctatcatacatgtaagttttctcagtaataggctataaattttatggtctacaatgttgttaattgaacaactaaaacagaaatttatattatgaagtgggaccacctgaaaatctttatgtggataataacttactggaatattaaaatttgagttattaacacctgcaagtgacaaatcatctttaaaaaactttaaaaattctgaaataaacctattttccatgttttgtaatttctcattttgactaaacaatttactcttgtaatccaattttgacaatgaatgataaattccaaccacgccatgaggtgtaaatgttttcaaattttcatatacattttcattcatcttgtcaataagttttgtatttctgtagttcagtttcccaaaagcataatatatattcccaagttcaagctcagagctgtgttttaaatttactctatcaaggtaggatacaatatttcgaaaacaatatatcggttggtaattatactttgcaaaagtataaagcgatgttgagattaacttcatgttatattctttttcactttctttcaacattatatcggcggttttcactgctttaaacactctagtaagtggaatcttaaactttaaaaaagagttaagtgtcactatcagctgattaatctggaatttctctaccaactttcccacatattcatcaacaaaaaagtctaaaacactgggatccaactcaatattagattttgaaaagcagttaagcagcagtgagactccttgaggtgttatattcttcattaaattatctgaacttgagtcatcttccaatgttaaccccttcctaaacttaatattaatatttaccaaatacctgtaaaattcctggagtgagttatagagaagtttatttgaagatttcaaaaacgcatcatgattcacattaatcttcgaaatacagttcaacactaaggataagtcctgttcattcatgtgttgaatgtttttatttgctatactcagaagctgtgaaacgtatctttttatgttatctgttggaattagattatacaagtgattataactcctgtttgagtgtaaattctggtagaatttagcgtatgaattcagggacagtgaaacgtccttaggtttaagcaaagatttatcattgagatcaatgattttatgctgtaagatatccaaagactttgaaaatgataaattattgctgtttaataactttttcccttccaaaaaatcatatgctactctcttttccaggaatccagaacacgaatcacttgaaatcctctctattcttggaggcaaattaatcaaacctgaggtaaatctatgaagaaggcgtactgcctgttgcgatgttaattctttacaaatatttgaccattctagtgcaacattagaagcttttatgttacattttgccatatggcttaaactacattaattatttagatattctgttaaaaaattttcaaataattaaatcttcaatatttttctattatacatgaaattaaaaacattttaataaatttttgtctcttaaatttattaatgtatggggaatcctcttctaattatcactattatttatatacacattttatttgtaatattattttgtaattttaatggttaataaaaatccaaattatggtacttttatcaattctttcaagttttccgatgatttggaggattccacagagcggaatctcgatgtttatataacactttactctaaaattgcaaatattggtcctgttttggactacgctttaaatgttaatgactacaataagcctttaaactctgaagattcttttaattctatcaagaatccaaaatctatcttagatttcaatgttttatttctagttctgagacctagtttggtacttaatttttaatttttactaatttttagatactctctactgatcatttacttcattccgtagctcgggctctaactaacgttttaaactctaaacctgtttccagcaactttactactgaagttgcctttatgttatctggatcttctagtgtaatttactaatttttcaatttttttaggttgcaaaatcactagaacgtgttttattatcaaaaagcgataaatttagcccagccctaattgttactcttgtacaaaataaggttatttttacataataattgtttttagtctaaggataacatcttggatatcattgatggagttcaagatgacatttccaaccttgataaatacaccaaggttgacgaacttataaaggtaaaacaactaaaatctctacatcaattaatacactagatatctatgtattaatataataaattaccatgaaaaatgtatattcaggaatttaaaattacacaagaagagcttagactccctgggggattagaggcttcgattttgtgcagaattggagttaaaagaatataacatcaactttatatccaaaccgtacaattctcaatggaattcttaagataattcttaatttaaatgtaataatagaaattacatattaactcctagtatgtttgatcttctcattacatctaacaaagagtctaatttatactttacaaattcctccacgaatgttggataatcctgttccaagaattgttttatgtatgaatgatcttgtgcatccaaatcagtttctagatttcctctattgaacttaacttctagtgttcttttcgtcaacaactggaatgttcctcttccatgcaatcttcccaagtgatactgccctgtgtatataattccgtttggaaacacttgtgacatatttccgtgcttagaaccataaaagaataacccattatacacttctcctttagtgtccttatatattccaggtccatgaggtaacagcttattatcgagtttatcaaactcttgtgcaaatagcttcaaatcttcttcattgatcatggggtctaacttcataaactccaaatcgtccttaagctcattcatatctaaggtttggtgtggataaaacctcaagcttccgttatacttgaatccgttagggaatttaattgatacctcattcatcaacatgttatcatcttgccacacagcttcaactctcaagggtgacccggatattatggtgtttatcataccctggttaactcttcttcctttaacccagtatccttcaaatgatgtgcttttattatacttcaaaatgccttttccatggaacaagtctccatgtaattgtcccacatacactcttcctgtcttatctatcactgagcatactccaaatatcactccgttcttaaaattccccatccttactgatccgtctggcatcgtcatcatccctttcccttcgaactttccatgcttaaattcacccttttgtttcactccatttttatacgacattgttccctaaatatatttttatcaaaaatgttaattaatgtgtatttaaataagtttattacattgccatggcatctgttatgtctgaaatctcccacatatgtatatgttctcgtttctaatcttccaaatccatgtttcttatcatttaaccagtctcctacattatttaacatttaaacgaatttattaattcagtatataaccaaaattatcacacatggattattaaaattatgtatttaatgataattggctaccggtgtatttgatatcatttgttattaaagttccttttccatgtcttttatcacgtaaccatcccccatcatatctatacttaattttctaacctaatgtaaatattttagataaataattagtttacatagttaagtggcatgtgggataaaaattacctagaaccgtctttggaaacgtatgatcctttcccatctctgagcatgtctacaagttctccaacgtagaaatctccgttgggatatgtatatttagctacgttttggctaaggtagaacacaggttcattgaaaacttctaggttatggttcatataaaaatccttaaaattgtgtgtttgtatccatagttctacaaagtctagagaatagttgttctggatctccacaatatgtgtggcaaggatcgatgggagtttaatctttacttcctgatctccttccattatatacgattttctctgtgcgtcatctataggttgatgatcctcaacatcagaatctggtaattcctgcatagagcctctcaaatacttatctcctctaacaatatacacaccgtcaactgggttattaaaatcaataacagagtctaattcgaaaaaaaagtccattaccagatgatatggtcgtcttcctttccctcctgcgtacgcgaatgatttgagaaatttgagtaaaaagtctctcaagggttgaattctcgttaaaattgcatattctatttccttatttcggtccttcacatcctcatactgtaaatactgaacatatcctaaatatgtatacttagtactcctcttcatcatcttctcaaacattacatcgaatgtaaaggttggattttcttctactgaactcacttcctcttcttctttcactacttgtgaagggttaggatcgtcatcaactatctttgttaactcatcccattgagcttttaactctccaagcggatcaaaccctttaacctttttatattccgatgctctatcttgtgctcccaccacatcattctcaccaacatctgaaaatttatccacatcttccttatcaccatcaggttgtccgggcttatctagctcaccatcactttgagccattttttcttcctcttcttcatcattttgttccattttaactaggtcttcttgatttcctacagtttctaccgttttttccaggtcctgatccctttctatggtatcagccttttcaacaggttccccagtgtcttcagttttatccacatcatcatccctttcctcctttgaatcatccttctcaacatcttcatcttttccctcggtttctccagttttttcgggctctttttcttttttctttttggattttgacttttttttcgagaacctaagaaatttaggcagtgctccaggaaaatatatatcaaatagacgcaaataactctccttgtgccttctcattcccagtctccttcccatgtggtatatcttactcgcctttccgcccagttctatgatagttgaaggagctcgcgatagataatctcccacaaaatggaatatgttctcactggtgtccatgaccattttcaaaggctcatcatcaatttcaagttcatccaatagctcgaaatcgtcaaagaagcttatttcatagaatgaaggggaatagtaacccaaaagttctctagttctcagtctaattatctcctcttccaagtcaaaaatcaatgtcggcgggttactaagcttattcagaatcttcaaatcactaactccaatcaagtatcccgacatcttattcagtaacggaggcattgattctgtaaagtatggataaattgggttatctgatctgaaaaggtccagtgggaatccatactttttccagttaaaccaaagtgatccaaatgccttagagttaaaattcagtgaacttgcacacgggatcatagttaatagtgacagtatacaagtgcttgtcctagctgcgcattctgaatatatcataattctctgctctgtcagaacagactttaacaaaaacaacaatgcccctataatgcagttatacacgttttttacttactgtatgataaacatagtgaaaagggcttaaagtgatactccaaattaaagaacaaagattcgtaactccactaaaacaatattaatttacttaaaacttacatcctcgactttatcattcctgttcacatgctccacaaatgataataacagagagtgactacaaataagattgatttaaaaaacttactcataaaagttcttattatcaaaataagcttgagctaagtattctagtcttgatcctattagtccgaagaatggcactttatataccagacatatagcaacaaattggccattaggtgactgagaactagttttcttaacaattggctttggtggttcatcagaacccgtatcaactaaaactggttcttcatttttctctttcacttcattttcattttcattttcattaccagttggttcagtttgttccgttgtttcagttggttctagtgattctgataaatttttttcaggttctccattttttaattgtatttcttctgctaattggattacatagcttgttccataaagaacattagtagctgctgttggaagcacgaaatggacaaaatcgactagagaattactcttcttcgctcctaacgctaactctggcaataaatgtaaacatgactgtagttcagaatcagtatccctatttgcagtataggactccgttttctaaaataaattatcctaaattataacttacgtattgaactttaagtgacttggtatcatgtttctgattcggattcaatattggagggtatgaaaaaaggtattcactctttgaatccctgtgactaatgataaaagcgcccactatagtgtccccgtgaagttctgttgaatacaaattatcataaaatttggtaaactctgtctctttaaactcttccttagttaaatctgttttatctgtgtcttctggctcaggaataagcttagtttctgaaggtggaaagccaggaagtgaatcattttctgaaaaagaatcaagtcgttctctatttttatgttcttcaaaagcagcagattcaaagtccaagtaatccagtgaatcaagttcatcagactgttcagcacttagtgttactttggagtcaaatgaggttgatgttagtttatctgtgtcagttactgactgaggggtggtatcagtaaagtccattggaactgcatcaattgcgatctcctttaggggttctttaaaagttgaatcttgggtaaatataagcaaatctgactcacttcctactttctctggtttaggatcagacggttttgggtctggaggcttagaacttccaacattcaggtccaaaatttcaacaaaatcatccgccaaagtagattcttcgacctttttatcttttgaaccagccttagacttactactccttgattcgaagaaacgtcttaccatattttattatattacatctggtcaataaatttatcaaatattcaggttagaaaacctcatacaagtgaaataattaagttactgcgataaaatatttattctagttcaaaaactgatacttaaaagcaaaaatatggtacacggttatgaaaatcacatagtgaatgaagaataaaaaaatgggatcaataaagggtaaatttttaaaaaataaaaccgacacaattctaaagacacttccttattattataataaaaatgcaaatgatgtgtaaaactaatctttcagagatggctcgtagaagttagtacactccccatagagaacacatttttttaatataccagaataaatatttatttaaaattataaatatataattttttctatttagtactcttgtttatataagttttcaagagattcttttagaatttttcactgttgattttttttgatttaagtgttaaaattttgtcatttatacctgataaataattccgaaatgaaggtttacaaagatttgtactctaatgatgaagtttgctctgacgcatacgatcatcatgacccattcgataatgcagatctttcatctggtatgttattcctatgattatttatttatgtattcacatttgtatattaatttttgatattacaaccattaattaattttttatagttgcttttgaagtaaaaacttcaaaggttccaaaaggtgaagaagactatggaatcggatacaagtacaccttagattaacttattaattatttttagtgatgaagaaggggccgatcaaatgaatgttgaccccaatgttgaaatggtagtagatgtggttgataaatttggccttcaatccctttcattgacgaagaaggattactcttcctacattaggaagtacattcagagattagttgccactcttcaggaaaagaaccctgagagagtagaaccgtttaaaacaacagtttccgatttcgttaaacatgttctcgcaaattttgaggattttgagttttacgttggagaatccttggactacgaggcaggactcgtttacgcctattacaagggcgaagaagtctcaccgaggcttgttttcctcaaagacggacttgtagaagagcgttactaaatatagctctcatgtattaatcaacttgtttaatctctagaccactcgtacacaatatcacaccttaccataattattttaatatttatagtttgtactctgtgtttttattaatgtgttaacttctctatattaattgtaaaattgcaaataactttgtaaaaataaaataaatcgtttgggtgtaaaccatatctttgaagtaaattagtagaatcacctctaatttggtaaaaatgaccatggatacaatcggtggagtcgtacataaaaattttaaatatgtttacgtttcatctgatattaatataccagtgaaggtcttggaattttccgggaaggagaattctttcagagatttaatcacaagtcactttaccagacacaatctgctcccagaggagcgccaagactttgaaaagtacttaataaaggaatatgaaggatccaaagctaaaaataactctgaaaatgacccttcagggggctttaagcttacacctgatttcctcagcaatactatcgacactgcaggctcaaactaccaggtaatttttatatagcacaaatataccatataaatactataaacataacttaaatatcccatatttatatcataaatttgcatatatttcagattatacccctaactttgcctagtaagaagaacgactttttgggagttaactgttacattgacagtattggcagggttaaaaacctacctacgaactctcgaatgacaagactttgttcaacgggtattaaaaacaactgaatattcatctgattcattgattagacattagaggtgactgcttcatttccagaacctacgatgacgaggatgttttcaagagggtagactttactcttgaggactacaacgagttaatggagaatccgccctcagctgaaggaaggtttgggaactagaattcactattaaatgtataggtgggacgtttctaaagcgttttctaacgctttatcgcaggacagtttgactaaaccccaagaaaccgtagtcaaaaaccactgtgaaaattgtaaaaaggtacaaaataactcaatttcaccttagttataactcgattaaacctttgttactaaaataaattatatttaggaaggttctgaaagtcaagttttgaaaatttgtactggctgtaaaaaggtaaaatactgttccgtcaactgtcaaaaggaggactggcggtttcaccgtagaatttgtaaattgtaatatacaaaatttatacatattaatgaactgtaatgttattttgtctatacatactagtgaattttaatgttattttgtctgtttggaggctacaatttggtcttgaatatctctggggacggggctgtagtgtgacatttccattgtgtagaaccctcttccttgactgattttcctgagtgttgtcatgtatcctgtcatttctctaagaggagcctcaccttcaatttccttaacagtgccatacccctgtttagtatttgtaaccctacctcgtcttcttgaaaggtcacaaacaacttctccaaagttatcagtaggacaagtaatgctcaccttcattattggctccagtagcttcattccggaaagtcttgcagcttcttttatgcctctggatgacgccattctgaaggcgaattctgagctgtcaacttcatgatatgaaccgtcggtcagaactatcagcacgtctgtaacagggtagtttgcaaataacccagtgttaagctcatctcttatcgcgtcctcaatacgaggtatgaactccttgggtattgcaccacctattatcttactctcaaacttaactccactgccttgctccaatgggacaacctgtaaattcacatgaccgtactgcccttttccaccagtttgcttaataaacctaaataagattttggggatagatatttccatactttccttctgaaacaacttctttgatgaaagtttctttgaaagccacttgaggagatccaactttcagtggtaagttctgttccctttttattctgtctaccatgacatcaaggtgtaattctcccattccactgattagtgtttctccagtctcataattctaaacaattatacttctctaagaatattactctgtggactttgaatgagggatcttcttctgcatatctgtcaagaatctgttgaattctaggctcgtcttgtgggtttacaatgtcaattgaaagacttatcacaggttctggaaagtctattgactccaaaactatcggatttttctcacagcaaagtgtgtcacctgttatcgcctttatccccacctaatcacagtaaataattttataatattatttttactagtgagacgatatcaccggcatgtgcttcctttattagtttcctttcatttgagtgcatgaagaggattttttgcactctttgactcttctttgttcttggattatacacataatcgccggtctttatagaacctcggtatatcctgataaatgtctgatttccaacttgttgatcaaatgacaactaaaataatgttcaatttatataaacaaatttataataaatttatatccacttttacgataaatttatatacactttacagtaaatttatttgcaaattttataataaatttatatgtataattgtgtaaaagtgtaccttgaataccagagctgctagtggtaatgtgaagtctgtgacgtcaaagttaacgttttctaaatcaatttaacaacggattaagcctacggtttatatctaattctgtgttttcttcattatttccagtttctacttcagattcatctttttcattagatttaacagtattcaggaacagtttattagtctcacaaggtgatggtaaaaaatccaaaaccatatccaaaatgcctaaaattaattaattaattgttaaaattgccttgaatattcttattttttaatgagcttccacaggctactggaatcacagtgtttgacagtgtgagtgatctcaatgttcttctaatttcaatttccgttataggctctgacaaacttaagatttatcaaaagttaccttcagagatgaacttttctaaaagctcatcagattcctgtgctacagtttccactaacaagtctctacacaatttgtcaatttatgaacaacttccatacctatacttattatattcatccatttgatcctttggaacctccaattcttcatattcaaaattctttttctcatctttaaacttgtaaaatttgcttctaaacaagaattaactgggtgaataatatattactactccttaaataaatccgaattaacaataattacttgtaaatgactacctgacgatatctataactccttggaaatcagtgtagtttccaactgggatgaacactgggattggaaatgcgcctaatttctccttcatctcgtcaagacacttttcaaaatttgatcctattctgtccatcttattcacatatgctattcttggtatctataacattagtttatactaattccataattagaatgcatataatactatagtacagttgataccttaaatttatcagcttgtctccagacagtttctgattgtgtttcaactcctgcaacaccgtcaaaaactacaattcctccatcaagaactcttagtgatcgttcaacctattcaatcatttactgtataattatacctctagagtgaaatctacatgccctggagtgtcaattatattaatgcgatgtagtggaattttacgatatccacccctccagaaacatgtggtggctgctgatgttatggttatacctctttccctctcctgaggcatataatccataactgcctctcctacacaactgtaataaagttcaaattaccatcatggacttctcctaatttatatgttacaccagttaaatataatattcgctcagttgttgttgttttcccagcgtcaatatgggccataatacctaaaatccattgaaaattagggtaaaattggtctgaaacaaaccgatgttgcgatatctatcaagtttgacttcggtgatttcaaaggttttaggaagagcttgtaatctttgttgattcctatcattctttaaaaaaggtatagaagaatcctttataacagcggttttattaataaatccctgtgtatatttattacatttactgcgatttgttagagaaaggggaatcccgtttgttagaacattatttacgaaaaattgtgcagaagaatttaaaatattaagtgagtttacagaattaacacatgtgtaaatgaaagttagatagaataaaaatttatgacaacatttttgcatttcatttatttatttaaaaaatattatacagatcagataaatttaactcattaaaatttagttttaacaatcttccaaatatgtcattacaattgtatatgtggataaatttaaattttattttattttttaccttattattattttataaatgatttaattattttttaattttggtaatggaattttatatttaattttaaaaattttcattaccaaattcgtaatattggttctactttttattatcaattctttacaatttccccctaattttcaattataaattttaatttaaatatataaagatgtcgatatatcagaagattgccgatattgaggctgagatggccaggactcagaagaacaaggccaccaactttcacctgggtttactcaaagctaaactctccaaactcagagcacaactcattgaaggtattatacacacgtttagcctctcaaaacttttaatgatttattaatattatgattaggcggaggaagtaaaggtggcggagctggtgaggggtttgatgtatctaagactggtgatgctagggttggtttagttgggtttccttcagttgggaaatcaactttactaaacaagttaactggcaccttttctgaagttgctgactatgaattcacaactcttacctgcgttcccggtgtaataaagtacaaaggttctaagatccagttacttgaccttcctggtattattgagggtgctaaggatggaaagggtagaggcaaacaagtcatagcagttgccaggacttgtacacttattttagtcgttctagacgcagctaaatcaatgcatcataagaaattacttgaaaaggagatggaaggatttggcatcagactcaacaaatcacctccaaatattaccttcacacgaaaagacaaaggtataacacaccccttaaatattttgtatagttaattttatatagtatgaaattatattctttaggaggagtttcaataacgcataccgtaccattaacaaatattgatgaggagatgataaagtcaatttgccatgaatatcgcataagtaacgcttcatttgtaattcgctgtgaccctaccgttgatgatataattgacgttattgaggggaacaggatttacataccgtgtctctacgttatgaacaagattgatcagattacaataccagaacttgatattctatctcaagttcctcactacgtaccaatctcagcacatcacgaggtatctccaatacaatcatttagtcaacaatttactcaacattatacttaattacatacttaataatgtatttcattgatgttgtagtggaatttggattgtctgttggagtcaatttggaagtatttggatctgataaggatctacacaaagcccagaggaaagattccggactatgaagcacctgttatacttaagaggaaccactcaagagttgaggatttctgtctaagaatacataaatcgcttcttacacagttcaaatacgctttggtttgggggaaatcagctaaacataaccctcaaaaggttggaaaggatcattttctggccgatcaagatattgtacaaattgttaagaaataatctaaaccattttcaatataatactttaataatattttgtgttattggtcttcatattagtgttattatgattccgggatggggaattaaaatcaaataataatcaataatgattaattaaaattaaattggttattattttttagataatttaaaatttgtaatgtcttcgaataataataatcctcctaatattgatgttgacgttgtaaagggcttaagtcaaccttctgctctgtatgatgaagttgtacaatatattttatcaactgtcggttgtaaactgcaaaatgaatctactctaagactcgtatcacattccgctcaaattgctctcgaaaaggttctttttctcaattttatttatttgttcactaatttactaattcttactaattattttttgttaaattatgaattattttgtggtatagttttttgaagaggctaagagtgtccaggtatcaaataggctaaacagagctgattatgaagataagatgagtgttctgaaacaggacattaaagaacttgactatcaatcgatttgtgaaacacttcaaaaatataagtctaactctcataattataaccttttcctcgaaccaaatgaaaaattttaaacccttcattacacaaacttaatatctaatttactcactaatatgcaaaatatatagtagaatattaatccagtagccatggattatctttaataacgcttgggtctcgttctccgtaatccaccagtaactcctcaccactaaatcaattagatgataaagttgaaaataccattcgatgtcacgtttggcaatgaatatgagtcgggggtaattattacttaacagagttttcggcacgatgtttgcgtttttccttgaatggtttactagtctagcaggaccaaagcttatatcctcctcagtagcatcaattccatacctcgtgccattatgcttaaaaaagaatataaaagatctaactcattattaatagtgattaaggtgggtacaccggcgtaattatgttagaaatagtaactaggctgatgctaccctttgtattttttggatttattgtacttgttatttcgaaaattcgccactttctccgttatcaactctcctttatactctaacaacaagttaattcagtaaataactcaataatttaatcaataatttaatcaataatataatcaataatataataattaaatgggtgaataactggaaatagagttagtatacccatgaggaaatcatctttgtgtattttgtatgcggcgtaaacgcctcggcctttttgggggttaaatttgatgtgtactggcacatagaaattcctcttcatacactcattatataccatattcttctgcttctcagtcaatacttgcatactcttcctaaaatcatatttactgtttaccatatgaatagggtgtatataagtagggcatatataattggggcatcggatgtggtaatatagttgtaaattacctggtgaatccattatcatcaatgagtaatttgatgaggtcatcatcttcggcatgtttattgatgacaattctggtcattttcccgccattctgtcgttcaatttccagtaatttcttaatcttctcctcagcgtctcgttggaatagattttgcataataataaaattattatccagataactgagtgagttaggtgtgattttagtctttccatttctaaactcactatctacagtgactgttctcttgcgtctgtagagcgacttgaccatctcagggtctagctcgatgattgaagtctcaatatcacctgcaagagccaaattccagaaaatattcggacaaaactgggccaacttgttaatattaatattaagacaatcctccggtaacagtgatttaatgaagttgaaacaggatttcagagtattatcagagtaaagagttacgtaatcatattcgaaatgctttgtatatatagtggggaactcaatttttaatacttgtccctctgtcagtaccatgtcaccagatctatacaacacattcccttcatctctcaccttcaccaaattcaataaaaactctttagacaattgttcatcccctttacctaattcatctcccgtattagagagattgccattggtcatgtcatctatttggtccaagggtagtgtgttttccggaatgtatactgtgtaatttttcttgattacagattctgacctgtaattagccacggaatctgggcaacttgaacccttgttggagacgtcaactccaaccagtaacttacactcatcaaacaagtcatctggtaagttaaactgtgttccattttgaaacgtgtttgaaaatggagaatctgaatttgatgactccaaatcactttcctcatcctttacctcaacattctctttcttcaccattgacttattatccaccatttcctctctatgactaaagaattattagatttatttaccaataattatactatttaataattattatggtaattattatactgttaactattataatacggttggcgatacctattgggattaacggagagatatcgtaggtcgaaatgtgttttgttggagggatgtacgagtactcggacacggttagggtctgttccatcatctttgccatagagataacttctgtaaaactcataattagaatcttgttcatcagatgatgagatttgagagtttgcacagtcaaatgagagacaatcgtctaggtcagtggaattcttattaaacgagaccatactaacctcggacattgtccgtttcaccaccttaaagtacatactcttgaggttatatgaatatataaccacaaacggtgtataaccatcccttgcctttatcatcttcaaacactacagaacaaaaaagtaaatttggcgtaaaattgactaattaaatggaataaattatgtaaaattaactaaaaattggttaaaaataaataattgtgttgagatacggaaacgtcttgaatgatgtcgatggtgtaatcggtgaagaccatgtagagtttttcggagttggaaaactcattactgagtgaggtgagtgagggtatcctcatgaggccactgacttcagagttttcaagccagaataacttcaggggttgatgctcgtggacatatttgtaaggctcaactccaaacaaactgtcaacatatgacgtataactactgtcaatgttctgatccgagtaattgtactttgaatctttcacttgtttctttgtaacatcaggcgtactgagctcagcataacttatttctcggatgggaggttctcttttaacagattttactttttgtattctgcggtacctgctaggccgtggtgttaaaatttgatctcctaatggcttttccgtatattcggcatcatttgagttatccactttagtaccagtgtcaaccttatcattgggggattgaataatttgtacgggtattggagtgcagttgatggaagattgcgtttgaggtgaggagtgatagttacttgtaatatcagctaaatcatctttaaaagactcgtcagagtctgaggaatacgaattaatatacgatgtaatgcgtgaaatgggacgttttggtcttccgttaaaggtataaccatttctcaagaaacggttctctatatttttacagctgaaattgtggtaataattatccgtatacgagtctctcattggtaattactggaaatctaaaaattttctccaaaaatgaaaaatccgataataaattgaaagaggaaaaataattccaatagttggcgttaaaattttcaatgtgtagaaattgtaaaaataataaatattctagtgagataaaagatgttatgaaaccagcgacataagtgggcagaataagtgatttgatattatcacataaatcaccaaaactaataaataaaagatgataaattaattatttaatgtgtaaggtatttatttaaaaaaacgacatcactgatggggtggtaaataatcaactcaaaaaactcttaattcccaatacaccaactattttactcatatatatacaataaacattaatttctcagtagtaatatcaattttccatgttataacattgcaagggtttagacatgtctatgagaattagaggcagtgacctttaaatttacatagtacaggcctgaataaatactttggtaagaatccattctcaggtctatctttaaaaactattccattacacataacgggtttatttttcctcgaatcaaacataaactaataatgatttaattatttacatacttctgttttaaaatatacaaattcatttttcccactctctacagggaatttccacatcaaatgacccatctcctcccaccaatgtcctaaatcactcttaaacacatatactcgactttatacttaaaataacatgtatgtgttaaatagtgtgttagatgtgtgattacctgttaatcctgtgactgtggtaacagtgccgtcatcagcgaattttaaatattcttttaggccaggtctagaaaatatgaatttattagtaaaatttacatatttgagtatttcgggggtttattaaattccaggacccacttgtttccaaccagcggataatgcggtgattcctcagattcctgataatttttactataaagtattagattaaaggtactttgtggaatttgaagagttttttgagttttttggagatttcccagtatttcgtttttatgtgatatttcaggattaaagtcccaaaccatattcgcttccacaaaagatacttagagattttaagctttaacaatagtaatttacatgccatttttggcttcccattggaatattgaggcccttcatagtgtgtgatttcactttctaatggtccaattagcccaaatttatgccttccatttattctccctatccttctacaacacactattgatactaataataatatatgtattatcctcatcacaacatgtataaaatatattttttatggaatcccattccccaatatactcataacacaccagaacacgcataatagtataaattcaaggttaatagattatgaattacagggattttgcgataactttcaactgcatttgtaatcgtttggagagtgagggattgagttgtttgagaaagtcttgtcccagatgtttcatcaagtgcaaaatctgcttatttaactcctccgtcgagaactcagtctcgtaaattgatataaatatcttcgccaactggccaagattactattctccactcccaatatcatttgattgttctaatcacacatattaatcagtactataatagttatataattattacattagtaattggagtagtatactaggggtaataacataatactatgcttaaatatctaaactagtgcgtaactgggtaactaataaaatagtgtgatacggagagaacgagatccatgagttctttgtgtacgcgttttccttcagtttcatcttgtctgagtggcaggtgtttgagccacagtgtgagataattactggcgtctgggaggttattgccttggtatctgatgagatcaccgagtgctgcaactgcgttgtcagttgcattctgttgatctttttgtgatgaagggaatctcatcttcagtgctgaacttagcttgacagctgactcattcgctaaatgtgcgaattcgggtaattttgatagtctactcacgctgtaacaggcatactgtctcacactcgcctctttactctcaatgttcttgagcacgtgtggtaagaacttgtcccaaaatgtgattactcgagactgtaaaaactctatcatgtcaccacaaaaatacaacgctatagccacatcatcagggacattcttctccaagttcatacacagaaatctacaacacaatgttttatggtgttatagtgttaattatatttagagtagtaatattatactaattatactcttaagtatataaataattaactatatactaatactaaactaaataattcttactgtagacattggggatgacatgtggacatgaattcatcgggatgatgtttcatgacaactccgaagatatcaagaagtgatgatctgaaggtttgttcagcctcttcatcttcttctagagttagaatttcatcaggatctaagtctttactagccctgcatttacggtaaatggccttaatcttggatgacttctcaattatcaataataatttattagtcaacaggttaagcacattttggttcagaattccaggtcctgcacagtctaaacagcggtaaagaccgtttgctgatactgagaggatgtctactggcactgtgtactcagaatccacttcacgtgtcttctcaaggtctgtcaacactgcattcattatatttagtaataattccagtaacatttctttactgctgttacgcttctctattgctattctcttggcttcaatcatattcgccattgctgataaggccttttgttttagttctgcagttaacacacaggacaataatggcaacactgcctgagccgttgacgggatataatcctcatacaattccttcaactcgtctactattatcgccaccagactcaatgtctgctccaactcatccaccaatgatgttctcaacccagcaccaccatccaaacccatcaacaacgttacatcctaaatattatgagtgggttttataatattattataggggtataataatagtattagacataaataactcaaataaaggtaactaaaaattcatataataataattggtacttgatcttggaaagattgtgaggatttggttaattcggtgagtagtagtggtacgattttgggtaggaaaggtacaaaattggttcctagcgctgtacatagtcttcctaatgcttcatttatatactctcgtactgggtcatcgctctcacttggctgctccattatctgtatcaacgcgttcatacactcaatcccatcgtttctaaacacgtcctttcctaatacattattagtcattaacagacaaaatatgaatatttagggtaaaacaaaaatataaagggtaaaatgtgaaaattaaggggtaaatcaggggtaactaagtaaccacctaactatgcttagattactccgtagtggatacctatggacattccgatgattgaaatacattcgatggctttcccgcggcaagttctttcctctgtggaggtacatttagtaataatttccttcatgagtggaataattgtattgtaatatttaataaaatgttcttcaagaacacctgcggtgactgccaatgatgttactgcctgttcagtcactgatctgccagtgttggcgcttattttactcaataatctttgtaccactaaatctccaaatggtaataaatgttccttttgtacttcttccgcaaagttaataaaggccgaaagtgcgtgggattgtactctggggcttgggtcctcaaacgccttaatcagaggtggtaaaacctcttcatgaaagttcaattgtacatacggttgatggtctaatgctatttgtccaattgtctgacatacggcaaatcttattctgtagtctgcatcactaagtttctctagcatgatcccgatgattgaggagagtctgtcaatttcatcgtcagtcagaaactctacagtctgtgaaatggccattatggctacaaatttatactgccactggggtgtctggagatactgtgacgctgtggacaggacccagtccataaaaggacaattatccacagattcaaaagcacgtcctaaacgatctaaaccttcctctgaggcactataaagtgtatgtgcatcatcttcagtacccgtttccaaccattcagtgtaactttcatcctgtatatctagcatacaggtcattaaacaattaaccatacggagtccgaaattaggtattgacaatgctgtctgaggtttcttttcaggtaacaccagtaacaattccaatgccagagctctcaattcaccgtctaatcctcttgcaggtccttcagccaatgccagttctaacatacgtgtaaaaaataactcgatatgtggtttaaaaaacttagcgttattctcaagtatcattaatactcctgttagtgagctttccagctcatctctagcacctggttctgtacaacccaagagtctcctgagtgaatccaatatcaacggcacagtatccctcaaataactggcgacgccaacttcttcataatctacagcaactccaattacacaaatagcttcagttctaacactggtatccacactcatcaaactggtcttaatcagtgcggcaacttcattggatctactgactaaatcttctgcaaagtaagagaaacattcgcctaacaatttgagaccagattttctgtataccggattatcattttgtattaatctgatggtgatggaggccagttctggccattcacctggtgccatggacctggaaactagatctgcaatagtatcacaaacattacgacgtattgattggtgtgattcagactcgatggactttagtaatgaagattttaataaagatttgacatcatttgagaccagtttccaggtattatgaggtgcctcaccagaacgtgaaacatccaataaaatacgtattaaaaccactgattgtaatctcctctcatcctttggctccgttaacattacgttcaatgttagccttaagataccattcagatcatgattcttcaaagtggttatcttagcgtcggcatctgaacgtagagaattatcacttgaagataacgcctctaacaaagagacaaacacttcgctgttcatgttctcactcattagaagaatataactcaaagattaatatgttattccagttctaattggcataatacgatggaaaatttggtattatggtatctgggaaaattagtgtaaaaaaacaaaatcaacaaatgtataataatggaaataatgatttattatatgttacacatttattttaataattttaacgagattttacgcctttggggctaccccatggtacgttaaagaataatccactttatcctcattcatcacacttattaatcacacatctagttactaatttgtctaatctatttgtatctaaattttaagtggagattaacactgatttcacaatcttcttcagggttgtcccgataggaattactgggattcctcttgttaatacaatttacatatttatcttctataaaaaattttcatattaaattattctaattttaaaatgtaatttaaataatttatttattcatctttataatgttaaattttgggagtaataattttaaccactttacacaagtaaatagtaccaaaaatgaacctctcagcctctttattacccacgtaatatccttaagcagttagtataccaatgtacagtaatattgtgtatatgataaattgttctataggaagatgatgaaaatttaaattataatttttctctaaaatctttcgaaatttgctccaaattcacgaaatcatcagataacaatgtgagtgacaatgaggaggaagtacagtctaccagtgaaatgtgtgagtattttgtgaattgtgatggtcagattagggatgttgacatattacacactttggtatattctcagtttgagaatgtactattaatcctagtggcaacaaattctacatcacattacttcacaaatgaagacgatttttacacatttttacagctttacactttgaaatttgactctgaaaactctttaaatttggaaaattcactccaattattatctttatttcctgtaaaggtattttacagcctgttttattgtgtttagatggattattgtgtgcaattgaagtggttacaggtgaattatgagacgggttttctatttgcagttttactctttaattctggaaaagttaaaattgccagatttaacatcaataaactgtcaaacttactccaatccactcaggaccttagtaagaggttagtaatatcaatattgtactgatgtgtagagtgctggatttggaatttgtgtgggaatataatcagaacattaattacaataataaaatcaattgcttcgatatttcatacaaaagtatttttaccaccaccttaactaacctactcagtctgatttaaccttaactaacgattaatatgttgtgttatagtttgtgaatcattggtgatgttggcttgtggtacgaatgacgggtttttactcattttggatttcaacttaaacctcttcaactccaacactcacacatcagacaccaaagacgaggttgactgtatcgaagttgattctgaagttgtagattcctttaaaactgttccagtcttaactggtgtcaataacacacccgtctacgtatttttatactaattgtatcaatttttagagatcaattttatcactcaatttcttacccttaccaaactctttcatactcgcaatcggcactttctccaaaggcgtcgtcctatggtattcactacactatgtactatttacccttttagttctatatacttgacacaactgaatgaatattagggacgtacgacatgttgatggtgagctgaaaacgtatagtaatataatgaaaccagtgaataaagttaattggagtaggaatagtcaatttttattatgttgtacgtcaagtggtttgtatattgactggcagaacaacactactgccaattcaattaaccctgtgaaacttagtaaagataaaataaataatgtttgggataatatttgctggaatgtagactcctccgatgataccatcacatactctttcgattccggacagtatcaacactattactagttaccaatagttaacacattttcaagtagctaactaattttccacaaattgtctaaataatgtttaggctgatacaattgatgatgtcaaatatgaataagaagaatatttataatgatttcacaatttatcaatgggatttcctcaaaccacgtaccgtcccatattcatagttattacctagtcataacataattaacaattaaatgtcataattgtttagagatggagatggaagtgtataagtattctgattcaatggttgataatgtgaattattcaatgaagaatagattcattaaggatttaaattttgctaaaaaagtcggcatttcaatcaccaaatccaactcaagtgttaacacttcaaatgttgaaccaaatgataatctcttaaaaatgaggactaaaatcttatcactcaacacgtactacaataatatcacacactgttgttctagggttaagagtatgatgacgagtatttcaagttataagattaatttaatggtgtatggagggaatctgggactcctacacctaatactaacggttgaataattccaaattttaatcattttggcatcaactcattcgcataattcaggccaaacaactataaacatttatactatagctagagtaattggcgtatctaatccacatagtaactacataagtatatacctagtaactacataagtatagtatacttcatcttccttttccttgtcgagtaattttttatcgtatgatttcggttcattggagtgtaaggcccagaaacatgaaatagtctaaaacataataataattgagtaaatttacactattcccagtattccagttgtccatatgacataaaaatcccaacgcatattctctcctcttataatttataaaacaatatttctaatcaaacattattagtaaattaactagtaactatgataaaataatgtgtatactttgtctggaatgaagttgatggattcgatatcgccaaaaggtttagcaagatcattaatggaatcttgagtatcttgatcactaagattactcacatgaactgtagtgttcacagtattattctgtgtggtatccgctggctgcgtgttatcataattgtatgcattagtgtagtttgatgtagatctgataactaggggaattccctttgaatatatcccttgcattagtaaaatggcctcgtcagaggcggtaaaatctgtatactgtacaaatccataacccaaatgtgatgaagaagattgacctctaatcagctaaatcatacaattattaagcaattttattgaattatacaataataaaggagataattaggggaacttgcgtaaaaaatactttggttgagattacgttggttgaaaaacatttagccaaagtcataaattcctcatctccaattgctaaaacataattattaataatttaattattaataatttaaataataataatttaaataataagtttagaatagggaattacaatgatgaagacatccgatataacattgataattgtctattaaactgctactcataatataacaatataataagttaaattaagttaattcaggggtaaacgggatgggtagttggtagtgatttggcaccatttatagaaaaatgatttaaaaaacatttaatgagtaaaattatttaaattacttatttttttgtaaaaattattaaaattattggaatcacactttttttcggttttatcccaaatttcaatacaacatacacaccatgtgtcaaattaacctaatcttgacttgttacatatttagttgatttggtgaagatgagtgaattggatggcttagattctgagagttttctttcagagtcttcagtgtcatcagagaatgtgactgaggtcgtagaatcagtccattcacttcaaactgacaataatttactcagtttttcagagaaaaatgacgtcaatttgggtcaaaccagccgttatgaactgaatcccttccatttatcctcggaccagaggcttaagagaggcacgattcatgcgattgaattacataactttaaaagttattttggcactgtgttaatagataaatttgcttcatttaatgccattattggccctaacggctcaggtacttttactctcaaatatcaattgtcttaggcaaatctaatcttatggacgcaatatcatttgtactatgcatcaggacgagtacactgaggggtaataatctgagggatttaataaataaagtaccagatccttcagatccactggagaacagatttgcctatgtagcactaacacttaaaggtgataccgatttctcaaccttcaaacgactcattaatcacaacggacatatctcatacatttacaataacaatgtaattacttacacacttactatttacttatttctacagttatttcattgtcttggcccatagtaatattccggggacctaactactacataactactctaaactacctaatactgtgtaggtgataacgtttaagggatatactgaggcgttacatgagtataaaattaatacgttgggatctacaggattaatatttcaaggttccgtaaatgatatcatctcaagatcaccctcagaactcactaaactattcgaaaacatttctggatcgtatcaatcacttagttatacacttactaagttgatattactcagttattactactcagttattactaagttatcagtggttactgagataaatggttggttgtagaatattgtatgagaagccgtataattatatgagggataagattgcgaagatgagaatggaatataagaacttattgttaaagaaaaagaacttaaataacgaattaaaacaatttaaaaccatggactcgaccaacaagaaataccacaaacttctacaaaaccatgtaaaaataattatatgttaatttgattgtttagaatgagataatggtgaagaagaatctgtgcgaatttcaaattttagaacataaattcaaatcccacaccaacaaatacttcacacttctgtacccaaacacattatttactagttatacccaaaattaacactataattacttaaaccaactcctaatttaacactataattgcttaaatcaactcctaatttaacactataattgcttaaatcaactcctaatttaacaatataattgcttaaatcaactcctaatttaacaatataattggataaattaaccctaatttaaccttttataccctagatcactgtctaattctatatataatcctaattgttggtgtagcaacgagtataaggaggtggtgaagagatgggatgagagtaatggtatgaaaaatgagttagaggagaagctggccaatttatattacgagcaggggaaattgaatagacaaatacagcagaagacacaaacactcaacagcttacgcaactccatgatggactttttttccaataaaattactctggaaaataaaattgacacactaaactcagtcatcacctccaccactgaggatcaaacactattacacactcagtctcaggagttaaaaatagctaaaagtgaacttgagaaggaaattgaatcactaaacacagagctaaagagctgtgagaaggatacattcacactctcatccgcacagatgacagagtttaatcgatacctgaaggaatttaacacattgacttcggataacaagattaatattaaaattattcaaaataatattaaccaatttacaacacagttgaaatccgtacgtccaatactattctctagccagtcattaataatttctgtagataaagagtaagttgaagggaatgagatcacaggaggagcaagtagttggcaatttaacaaaatacacaggattaatcgaggaaacagaatccaaaatgagagatttcagatcatcactagaacaacttcaaacacacatgacccagttaaaagttaggaaggagaagttacatactcaaaactgtgaattacaggataaaaaagataattatacacaaatgttaacatcattgagtgtgttgaaacatgagtataattatatgttcaagaggagtgtgctgaataatgagatggcaaagacagtccccggagtgttgggggaggtaatatctttgtttgagttaacgaatgaagcgtattcaacagctgtaatggcgtcgttgggcttcagagcacatgcaattgtgactagagactatcaaacgattgcaaaatgtattgaatttctgaaggaaaaaaaggctgaaaaaagagatttcatctcactgcaacaacttaaatctgataaatccacaactcgccaacacctgtcacatttattgagaaggttcaataagttaaattacgcatttgcaattgatttaattgagccaaatggtgactcagtgagtaatttgtttgaatatttgctgggtgacactgtgattgtggacaacttagacgaggctgaacgggttgttaatttgagacatggtagggatggagtaaatttacagtttaatgtggtgactttgaaaggtcaaatgataacaaggaatcggacaatagtagttggatcaacactaagtactaaaaagagtgaaatggaactagagcttaacaaatacaataaattcaacgcacttttgattgaggttgagaaggagttacgggataattcagatgagaccaagagaattgagactgaactctcaagtggtactgacaagattgaaaggttcaagagaaatttacaactattattaaccaaattggaatatttgagaaaacataaagaatcgctagactcacagagaaatgaattgtcagccgagtccgacaagttgatgacacagttgaaatctctagagcaaactttacaagagttggaaaacaaactatcattagaaaacgaacaattggataaacttaagaatgaacattttgcacctttgaacactaagtttgaggtgtcagatgtgtatgaaatggtaatgtcgagagatgacaaggtgaataatttacataataacttaatgggtaaaaaaatgacattgagtagatatgagaccgatttactcgaattagagcgtaaaattgaaagtataaacggaagattatcagacttaaacgcacagttgacagatgttaagacccaattactcacgttgaaggaggataatttatcttcatgtgatggaattgaaactgtacaatctgaaatcacatcactcaaacaattattacaaggttacaccactgatattaacctttacactgaacaactaaataacataactactacagatgacaagtatgatgtaatggaggagattaatgggttgaaagaggaaatttatcaatttcatagtcaggctatggcgttgacggagttttgtaaagtgcataatctacccttgagattttcaatcacaccgaaatctcagtcagaatctctaaatttagaagaggaaatggaacaaattgttctaggatttccaatactgtccaacgcccacgagtttagcatatcgagcacgtcagacttggaatcggagtataaattattatgtgagaccctcgtgagtttgaagaaatcactctctaacctccgctcgtacggcgatttggaagataaaattgaatcaacaaccgaggaaatatcatccgttgataaggaaactgaaacactgaagacacaattagtcaaactcgaatcagatttcaacaagatcaaacatgagagatcaggcttatttctccactgtttcgaaaccgtaagggaaaatttaggcccaatttacagaaaattatcacaaaatgaagaaggcgctgaaggacaagccttcctaactctagacgattttcccacaacttccaccacaccaactaattcagttaatacatttaatagtacaattgatggcacactgaataataatgggagcaatacggtgaatagtttggttgatttggaaccgtttaatagaagtataagatataatacgatacctccgatgaaaaaatacttgagcataaatttacaaagtggcggtgaaaaggctttgtcatctatagctttattgctttcattacatatttatagaaattcgccgtttgtagttttggatgaaattgacgccaacattgactctgtgaagctgaacaatctaaccaagttcctaatggaaagcacatttcaagttatcatcatctcactcaaggataaattattctcaaaagctcaaagattaattggagtctacaggtcacaccccctgtgcacttccaaatgcctagtactcaatctagaaaattatcccccagatgaataattttactacacatctactcgcttatacttcatgtttgttttacccgtagtcaggtcatattcaggtcatagtactatttaatgttctaacactatttaatgttctaacactatttacagtttcctaacactatttacagtgtttattaagagtattaagaagtgttaaatagtaattactgacgcagagtataataggtttacactaaatattataaataaatatgtgtgtatactacattagtaataaaatccaactctatctcttggaattagtcttaaattcgatccatatttaaggaacactccgcctaaagctttttacagagttttaaccagatttaagcatatttaatgtgaaataacgttgtataagttggaatgtgtaagtgtaacctgcagtttgggtagggtttataccaacaccgtcgttggtaataatagcacaagtggctggattaagcctaaactaaggaatattcaagtaaatcttttacttcttcagcggcgaatttaattactgcagaaaatggcgcctgttcaggcacggacaaactaaaggaatattaacacaatacatacattaatcataattattacagcttatcaagaattaattatagattagtatgcaataattataggataattatgggtaaaatgattgggaaacgaacactttatatggctgattggcatccgaagctagaacgattttaaatgtgaccttcctaaataattattaaaaaattaataatttttacgctccgcatttagtttctgacatttatctcaaaatttaatactacaattctttaaatcacacaactctcacatcacaaaattctaacactaaaaactcaacaccctaccacaataattattgagcattttcatataaaattacttgtattgtaacaatagttctagagagttacagtctgatttttggacattaaatttacgtttacatgtttgataaaactcttcaatatcctaaaaaacattataatattttttattactctagatatttgtttctttaacatttcaatgtctacgattaggaaactctctgagtattcacttgcttaattccttcctacatacaattattactaaataactgtactactatacatatacacagtgtattatttatagtataaacagttaatcagtatcatgataatttgataatttttcataacaatttgcttttcatgagttctattgttggaattttaaattttaattcacaaataacactattaactacattgactgtgtgtgttgttaagatgtgtaggaagcgttccagtaaccacaagctaactatgatgaagatgaacttgtaattttaaatgagattaaagagggcaacaagtatgatattgatctcactaattacgtttagatctgcttgatctataagaaccacaggatctgatcagttttaaagatctagttccacacattttaaaggtttagatcaaccagttaaattaatattatcagggaactacataaaatgtctacaataaaggataaaaatatttccaccgaccttcccccgaaaaattctcggtttgtagaattaaacataaatataaaagaatatggatacggttttgattattttaatagaaacaggtacagcgagtatagatcatcgaatggatatgtatttaacaaagtattagaagatgatacagttgtttggaaggctacatgtacttatgattttgcacaatatgtattggtttatgaaggtgatgagaaatacatcttgataataccatactataataacttgatactattccgtcaactaaaagataacacgtgggagcgtattaatattgaaatcaatttggcgaagctgaagctgtataaacaatatgtttatcacaatgtacagattattaactttaaattcaaagtacttgaaactgttgataaacttagagatatgaatacattatctggtgactattattacgatcttgagaagactaattttagaatcattttcgataggttttgccatgtcatctcgcatgaggagaaggaaatttggaaacaaaccaaggataatgctcaccacggacatcttatctctctaaatttcgaactgatttcaggttgtgtaactattaagttcatagatggaactgatgaaactcttgatctaaatagaccaagcaacaaacgaccaagagctgaagttgaatccactgaagtagttgatctaaaccaatccattaaccaacttaatgagaattctgaaccaagtaatgaaaatgtagaggataaatcagtgtcacctgaggttataactttagatactgatacgatgatgtcgacaaacaaatataaaacagttcgtgtgcccaattaccatcattttaaagctaataatggttttgtgtttgggaagatagttgacggtgatagagtgattcttgatacagacgatcccagtaagtatgttacagaatacaattgccgtgtggagtttgattcgaatcttgagaaacattttgaatatttcgagtgtattagacctaatattgataagttaaaactttataagaaaaatggtatagagctcaatcctgatgattactgtgtgctttcgagcaaatactattatcaaattctctttaataagagtttgtacaaaataatatatgatggaaaggtgtattggaaatataattattataaaaacgaatgtttcccataccgtctgtacttttcatacataaatagtaacatgacaatgagttttcgtggtggacatgaaaaagaaataaaaattagttgcaatttgttgaaaatgtataaacttgaaaataataacaaaatacaactagaagatgaacactacgaggttattacactagaatatgaccgaatattttacacactaagagatgatattaaatgtaccgaggtttggtttgatgactgcatcgtctgggaacacaagtctgggaaagaatatcccaaatctatatgctgtaattataaattggccagaatagacatcagattcaattcatatgtagcttcatttgttaggttcggatttcaaaattatatcactaagtttttttacttacctaaagatttaaaattttataaagaggacaaaaatggtaatagtttggagttgagaccaaatgattatagaattgacctattatgtccttcatcaattgtgtatattcttaaacccgttaaatgtaacgagataagattgggggatttaactgtctggaaacgtcaaaataaaaaggcttttcctagaaaaatagtttatgaccttgagggacccagtatcagagtgtaccgcaaacagactcgacatggagattttcataaaacgagactaatgaaaattcatagaaaaaatggagtatggagattttattaggcgatttacaacaaatcattacaaaaatagcagtttaacttagtataataataaatttgacgagattagttaaattgtaacaatagttcaagtgagttacagtctgatttttggacattaaatttatgtttacacgtttgataaaactcttcaatatcctaaaaaacattataatattttttattactctagatatttgtttctttaacatttcaatgtctacgattaggaaactctctgagtattcactaagagaaatgtgtttcggattcgtcagcgacgagtttaacgtttccacagaacttacaagcgctttaatctaaaccacaataatatttatgaacatacgtgtgaaatgtaatctgatgaaaccagctgaacagtcttcaccattatatctttcaccacttcctacacattattaatgggttaattagtacttgggagagtatttcgcgtgtaaattcatgaaatgaacacagtggcgccactaaaaacttcacatagtcactcacttcacaatcctacaaattttcatcaccaatataccaactatactcttaaatactatctgactatactactgtttgaatatactactgtgtgactatgctactgtgtgaatatagtattgactagtgtgtctatgtgtggtaacttgtgtgtttgaggatctgaattttgaggctagtgattgtatgaattgtaaactgcattttgaactactatacaacgaactcacaatatattgacactacaacattattactactgtattatctactactgtaacactggtaataactagcaaatgctactgttaactacaggggatacgagtttgtctttaatgaagttgatgtgatcattaatattattaataaattctatcagtaataacattccctttactgtaaactttagtaatctcctgacttcacacaactctttatcacccaactcttcaccacacagttcatcaggatacaactctttatcacagtcaaactcaggcgatccttgtcggactgtgtgatcccacagagtactcaaatccttaatattctttctatttatatataatttaagtggaattaaacatgttttgaggattagtattgagactgcgccaaatccgtgaaaccgaacttcaccagaaaactcattaaatttttcaccagaaaactcattaaatttttcaccagacaaattgttggatttttcaccagacaaattgttggatttttcaccagacaaattgttggatttttcaccagaaaactcattgaatcgttcgccagacaaattgttgaatttacagtgggtcaaatcggaaatagtgagtgagtttaaaatttgaataatatcatgaagcacataggcagaatatgcaaaggataatcctgaaggccacagaaatccgccatctaatcctgaagcactgtgcgtaacagatttaccactgtgataatctagaacagagcttctagcgctggagtctgtgttattattcatctccatgtgaataataaatgactcaatgtggttgagatataacttaacgacatcactaaaggtcttcaaatgctggccaaacatgtgattaaacatttgaacactaaacagttctatcatctgcccatacaccaccagacttgatgttagaaaaaatgatctcactcccccatcacacatctccgtttgcgttgtatctgtgttggagttggagttggtgtgtggtttgatgtggtaagtttgtagattcccaagttcatgatatttgtgtagttcggaattaacggtagaaataacattatcgagaaaattattggtaataacattaacgcagaatctggtagaatatgagtaaggtaatgcactggcacgccacttgaataagttacacagtgttgagtcggatttacactcaattatcgtgagaaggcgttcgaatgatgagtagtttacccggtaatccgggtctatgggtgagaaaatgtgtgaaaatgagtcttcaattatggtaaaaatccaaagtgccacaggccgtagaatacataaactcttgaaattctcatcaccaattaactccgataactcgtccagaaattgcattaacacactctccgtaaatatcactttctccactctatccacaaaaccactaaatgtacccgcttcctcatgcaacatttccacactaccaacactatttacactattaaccttactaacactgttaactacattaacactactgacactgtcgacactattaacattagtgacactgttgacattattaacatttgtgacactattgaaagtagtaatggtaagagtattaaaggagttggaaaagggaattaggaaggtatcattgaaaatgtgtagcagaggagtgagatcagagttgagtagtgtgaagcctctgatggtataggtaagtgctgataaaaacttgttaatttcagctctaattcttactctgtcaacgccgtcactgttgatgatcgtgttcaactcattcaactcagtgtaaagtttgtataatcttgtaaacgctacgctggaacatagttcagtcagggtcacaagtgattttcgcactgatcgcacatcttcctccagttttttaacacataactcagcttccaaattgacataatctaaaaacattattagtactaactggatgtgtattaatggcatagttatgggtgtaaataggtttacgggtatgggttaccagggccaagtcaagcacataataactataaagtatgataaatatatagaattgtagatatattttaaagagttttaagagtatttaaggtatataattagggaattttatgtttattttgttaattttaaggggaggttgtaacatttattaggttagaattttagtttatttaacttaaattaactaaatttagagatatttaagttaaattattgttaattaagggcaattagtagaaatttttctctctaatagataaataaaactgtataataacagctaaagtgaacctgaggattcataaagaacccaaattttctatagttaaaactaactttttttcttaaatttaagtagtttgattactaaaacatcaattggaatgatttggaattaattaatttaattttctaaatagtcgaaaaattttcatttttcgaaacccaaatgtcacttttgggtccagaccatttggccaaaattcgaaaaattttttttaaactagttttaactcaaatcactcaattaatcattgttgagaatcagaaaattataattaactctaaattatctgtgtacacagtgctacagtatgtgcttaactgtgcctgggtaacaccctcactactcctaactatataatatactatataaatagtacttggtatatctccagtagtatggtaagttacctgcgattgaaaaatgatgaataacatattgtaaacaactttcaaaatcatctgaaattgtataatttggaactaattccctcagtttcccgtcatatgatttaaattcctcaaccagttgaagcactctatccaattctttaggtgcaaattgtaatattaaccagctggattctaagttatatccctcaatattatgtatcatactattcaacctatacacattcttactcaccaactctatcatcctaaccaccacactcacgacacactcgtcaactcctacactattacttactcctacactatttgtaacactgtcaacggtattacttactcctacgttgtcaacattgagagatttgaaagtgtgtagcaattctgtacaaagtgtgtgaaataaccttttactgagaattagcttacttaacgcttttttactatatagtaccacagttaacctgtgtaacaaagagttcacactggcgagtatttgtgtattcttatctctaatacactttaaagattcgtaggaggaggtaactttgtcctttagaggccacattgacatgataatcttcttcagattatcattatgccctgtggcatttgagaaggccgtggacagaagtgttgagccgtgtgattgacttgtgagtagaagtgatgagaactcacgctggagctgttctaatgaaacagattccaagcgagtggaaatgtaagcgccaggcgacttcaactgcgaattcatacaacgaatccaatccaaagattcacactttacatccatttcaacactttatctcttcattatttaagagtagagaggggaattttggggattttgagggggattttggattatttgggggaaatttgggtgatttgggaatttttgaaaaattgttaaaatttcataaaattctgtaaaaatattaaaaataataatataataataaattaatataaattttattaataaaattttaaaatgtgtagaaaagaggagttgttatagtgcctcaactggttcctttatttttactaataattaaattatccaagattccaaaaatcgtttacataattttaatgaataaattgagtaaaattgttgaattttggaataatttggatttttggataatttgtggaatttgttaaaaatttggataaaaatttggataaaaatgagtactacagaggattcgatagatttatcagaggtttgtgtgttaagtgacgcggacgtaagggcgaggattaatatgatcgacgcagaggtgaagattctcaagagcgaacacacgagacttaaatcgcaacagaaaatgatccaagaacgaatcaaagataacttagaaaaaatacaattaaacaaacaactgccctacctcgtagccaatgttgtagaggttcccctttactcattttactcagttatttttgttaacccgtgattacatttgtgctgagaaaacattaatattttcagttgtcacgggtttataatatttgtgtataatgttgtagttgttggatatggacgaggaatatgaagaggaatacggatccgcacaaaacatcgaatctaaacccaaaggcaaatcactcgtcatcaaaacctcaaccagacaagtatacaacaccttcttacccctcatttaccccttaattatccttactttacacttatattagctttgttttggcctattttacccttaattttaccttaattagtcttattttacctttatttaggcctattttaggcgtaaaatagtcataatttagctatattttacccatattttacccgtatttagtgttattttacccttattttaccgtaaaatcctgtgatttagacgatatatttgcctgtgattggtttgataccgcatacggagttgaagcctggcgagttggtgggcgtgaataaggacagttacttggtcctggacaagttaccgcctgagtatgataaccgcgtcaaggccatggaagtctgcgaaaaaccaaccgaagactactccgacatcggaggtctcgataaacaaatacaagaactcatcgaagccattggtatcatccacactatccaactatcttacactattttacactattttacagtattaacgtagttaacagtagttaaatattagcagcagttaaagaggttaattgtgtgatatagtgttaccaataacgcataaggagaagtttgagaaaatcggcataaagccacccaaaggtaattttacccactgttacacatagtttaccttatttctctgttaacacttggcacaaattgtgtgtaggaatactaatgcatggacctcctggaaccggtaaaactcttctagccagagcttgcgcagctcaggtaatttttacactattactcacactactaatactattcctaatactaatactaatactattactattactatttttaacattactaagattcatgttgataaactcaattttacagacgaaggccacgtttttgaagcttgcggggccgcagttggtgcaaatgttcattggcgacggcgctaaaatggtccgagacgccttcaatcttgccaaagaaaaagcacccaccatcattttcataggtaacactcacttagttatctaacactttaaagtgtgtaaaatactgaaattagtgtgtaaaaatgtgtaaatgtgtaaaatactgaaattagtgtgtaagaatgtgtaaatgtgtagaaatgtgtaaaatattgtgtagatgagatagatgcgattggtacgaagagatttgacagtgagttgagtggcgatcgtgaggtgcagaggacgatgttggagctgttgaaccaacttgacgggttcagtactgacgataaagttaaagttattgctgccactaacagaccttacactctggatcccgcactactcagatccggcagacttgaccgcaaaatcgaactaccacatcccaacgaaggtaataactacacagtttcccatgtaattagttgtaaatactattaaatattagtaaatactattaaatagtagtaaatagtgttaaatagtagtaaatactattaaatagtagtaaatagtgttaaatagtagtaaatagtgttaaatagtagtaaatactattaaatagtagtaaatagtgttaaatagtagtaaatagtgttgaaagtgttgaaattgagtgttacagaggctagagcgcacatattgcagatacattcgagaaagatgaatgtgcacaaggatacaaattacatggaactgtccagatccaccgaaaacttcaacggagcacaacttaaagtattatctactcttaccatttactcacactattgttatataattgttaataattgttaataattgttatataattggatgtgcaggcggtatgtatagaggctggaatggtggcgttgaggagaggagctacggagttggatcacgaagattttgtggaaggaatagcaatggtacaagcgaaaaagaaaaatccactcaattatctcacctaattttttatcacttttatatcttttatatctttggtatctttggtatatttggtagtgaacttagataaatgttgaataagattacaaatacataatttactcttagtctaactttagtaatttgctgctgtgtcattttaacagtacactggagtaatccttgagaatatgttactacttgacaattggaacacttagacaccaaacccagacacggtgtggtgtaatatacttaccctgttaacctctgaatattatacttacagtattatttctctactaccttcactatggatactgtaatacatccaattccacaattaagcttaaatgtatatattcctgagtattgctttatgacccattatatactatagatattacatgtacactctggtactctcactagtatacacaaattgtatagtgtataatagaaatagtgtataatagaaatagtgtataatagaaatagtgtataatagaaatagtgtataatagaaatgtgtagtgtgagagattaatcgattaatggtgggaattgatcgggttgtacggagaattcatgcatggttgagcacttgctgacgccaaacgacagcgcaacccaaaatgaatacacataaaacatcacaaacaacgatatcaccgcagacgccgcaaacttaaacgctataaacataatcaactatatacttaattatatactcaagtatgtaactataccacttaactacacaactataaactatgtgtgtgattacatcgtttttgtaatttgtatagtacgacgacttcggatttcccttcgggtgttaagtcgttggtttcaggcgggaattcatccttcgatacttcctcagactcaccctcagtctcacccggatgcggcataaacggcaaatgatcataaaaactatcatctcccgatttcttattattaacactattagaagtgttatcactactattagcggtgttatctacactattgggagtgttattaacactattagcggtgttaccggagttgacatccttagcagcaactttaccgtcaggattatcataggcgttgtaattagccgtaccgtcagtattaccagtagtatcaccagtagtatcaccagtagtatcacccgagttcttattttgaagcctttgtttgagggcatttcttaaactatttaaatcatcagcgtcgtcaaagttatccaatacgccactcaaatcatcatcaaatctatcatcaccaattttagtattaagtttattgcaatgtttgtgatcgtgttggtcaatgttcgtcacggtgaatttagttaccaccaaagtgtctgggtttaccaaactctcaggatttgctaaactgtcgggatgtactaaactgtgaggatgaagtaaggtgtctggatgaattaaggtgtctgggtgttgtaattgaggtaaaacgccagtggtatcgttgggaagtttgaaaaagttgaatggaaacaacactgacgcatttgggaccttaaatcttgtcacaaacggccccgtcaaccccaataacgtcaagttctacacaatcaaattgtactaatttactataccaattataccaatttactataccaattataccaatttactataccaattataccaatttactatactaattatactaattaactatactaattaactatactaattatactaattaactatactaattatactaattaactatactaattatactaattaactatactaattatactaattagggaggtaaatagtataagtgtgtcgagggttacgtgtaattcgggtgctttggggaagaagtgtacgagttctgccatgtcgagtgcgaccattgagaccacaactaacgaaaacacaaacaatatcaaatacatcaaatataatacaaagttccgagtcaacgtcgagatcaatctacaccatcaattgattcactcagtaactaagttaacaatgttaataattagttaactggatgggtaagagaataccctagggatcctgtgatgaagtgtaggagtagtaggaaccaggcgaccccgatgaggctcgggtgtaaataatgaagcgtgcaataaagacccacaccaaacaataactgcgtcaaagacactatcacaacgccctaaacatatattcacgttattttacaattatttatacaattatttatacaattatttatatagttaattgggtaattattagttggggattacgtatttgaggtctatgaagcctaggaagttattggcctttaaatttgatatgaatcccccgcccaattccatcgtctaacactcccaaacacacatttttaacaattatccaggctaaacttaagaattcaaattacaatacaaatttaaaattacaataaaaattgtgataaaagttacgataaaagataaaaattgtgatggaaaaattaagtgtatgaataagttaattgtgatgtgtgaattgattgattgtgtaggagttaattttagtgttaaaaaattgatgtgatgttgttttctaatgtgtaggtgtggggacttaaatccatcaaaattaaccaatttacacattaatttacgttaaaattaagttataataagttacgtaaaatttactttaaattatgaactttgggctagaaaataccacaaacaaattactccattatcaatttcacataatattttctgatgaatttgtggataaattatgcgttaattagcttttgtgtaaaagtttattcacgctttaatttctcactctcacatcttaactttagccgaaatcaccaattccgaacactaaattatgtaaatttattaaacaaacttaaaatgacaaattcctcaaaatttaagttttttaccccaaactctctctcacacaattcctcactcaacgtaattttacactattcccacacttaatttactatacccttgactatacccttgactacacatttgactacacaatttagtatacccttggctacacaatttactatacccttgactatacccttgactatacaattaagtttgaggaatgttgtagaaagctgtgggtgaggtgttgatagtgccggtgttgcaggataattattcgtacatattgaaggatccggcgagttctaatgcgttgtgtgtcgatcctgtggagtatgaaaaggtttacaacgtctcaaaagagaataatttaacactaaaacttgctctatgcactcataaacactgggatcactcaggtaaccactactatactcccaatactcctctttacccctaaacctttattctacccctttaccactaatttacccctaacttagtactaatttacccctaatttacccctaatttacccctaacttagtactaatttacccctaatttatcattattttagtgctaatttagctttaatttatttgttaattagttaggtcccccgcctcactactatccgggccaattgtcgcttgactttggagttcatagtagatccgtactatccactccactatattgacttgctgtagtgttaatattataataaactgtagtatagtaatagtataattaagctccccttggcggtcccccaccctactactatccgggccaattcccgcttgactttggcattcatagtagatccatactatccactgtactatttactatgtatacaattgtaggagggaacaatggtataaagaagttagtgcctgatatacaagttgttggttccagttatgaagacacgcccggtgttactctacccgttaaacaccaacaaaccatcccattcggtattctttacactatttaattagtttactgattaacatgtgattaggaagtttggtgattgaatgtttaaaggcgtcatgccatactatgggacatattatgtactacatttatcatcccactaatcccaatctacaacctttacttttctcaggtcccaactactctattatttattatatattacttagtatattatcactgagtatattgactatataatattgtgtacaggtgacacattgtttgtgtgtgggtgtggtagattttttgaggggaatgccaagtcaatgttagaaattgttaaatccgttaaatctctccctgaacacactctcttatactgcggacacgaatacacactcaaaaatctacagtacccaccactatactactgtactcatatacttaactatatacccctagagggagctaaattaactatatacctagaattatatacccctagagggagctatcttttatatacccctagagggagctaatataagggagagggagctactttactataattaatactatagtgatttgtgtttagatttgcgtatacagtggacccgagtgacgtggtactaaggaagttagactgggctaaggagaccatttccaaaggattaccaaccgtaccatcaactcttcaagaagtaaatttacccctttacacagtaattactgtaggagaaattgtataatccttttcttcgtgttgaggagttgatgaaatcactcaatgagaattccgaagaatccacaatgaacaaattacgctccctcaaggataaattctgatccaccaaatctaatctcaccaatctcaaactacacaatacataatattataatataataataataatataataataatgaatatgataatgagtatattgaggggtttaattttttttattggtgatgacttttttttcgaggtggcttgggatggtggcttcaactttggcggccttgacttggttcggtacggaaaaggtataaagatacctcgagcatctaaccttaaactttgtacttaaaagacctcccttggactttttcttataaaccactacagacctagcatccggcctcttcaagacactcaagtaatccttcaactccttcaactccttaggcatcctcactaatattttatccaaacaaatttattattttattactttattaatattcgaagaaattatgaaaattaaataatttaaagattccacacgaccccatccatacaactaacacatacaacacagtaaataacatattaacacagtaaataatgggtatagtagtaaataataggtatagtactaaataataggtatagtactaaataatgggtatagtactaaataataggtatagtactaaataataggtatagtactaaataataggtatagtactaaataataggtatagtactaaataataggtatagtactaaataatgggtatagtactaaataataggtatagtactaaataataggtatagtactaaataataggtatagtactaaataataggtatagtactaaataataggtatagtactaaataataggtatagtactaaataataggtatagtactaaataataggtatagtactaaataataggtatagtactaaataataggtagtaactaacacataagactgaataatacacagtaaataacacttaacactgaataatacacagtaaataacacttaacaccgaataatacacagtaaataacacttaacacagtggtaaatagagtaatgaatagagtagtaaatagagtaatgaatagagtggtaaatagagtaatgaatagagtggtaaatagagtaatgaatagagtagtaaatgggtaaagaatgttatgagattgaaaagagctcagaaagtgggaatcatcaagagggtaaatcaccttaagcaaacactgcgaatgtttctataccattcatcatcgctcttttactatacatttattgattcaccataccgttacagcgtcagaatgttagtatactagactcagtactattagatgttagtatactagactcagtactattagatgttagtatactagactcagtactattagatgttagtatactagactcagtactattagatgttagtataccagactcagtactattagatgttagtatactagactcagtactattagaatgtgtaatcagagtgaaaggtgtagaaaactgagaagttttgagcaagcaccgtaacttaatcaaagagtgagaatcccatgtcttcatcttcttcctcttcttcttcctccttttcctccttcttctcttctacggcctgtgacgtaacagtaccactggcggtaccactgaaagcgtctggattttctagaaactgtttcagtgtggacatttgcgggaatgtgaactccgagtccagtacgagtgatatgcaatttttgaacccttcgagtagtgcgtggtctacggataggctggtgggatatcccagctccctggccatggcgttggcgtagctaacgccgagtttaaccactgataaaatatcctcatcggtgacgtcaagcactgaggcgtctgagatggcgccagagtcataaatcttctccacctttagaccataggaaaagggtttaatatttaatttctgcagtagtgtcgcgcctgacgccgtgactttatcatctttttttatcaggtggacttcattttggatttcaatttggcccttgacgatcttagttgagatccccagcgcctgaaaaaatgaagtttgggacgggtccaggcctgtggaaccggccgggataaaaacatccgacggcgcaattacgccctgcttggccggtgccgggactctgttgttcagaataacttccctgacctccatgggatccgcttcacagaacacaaagccagtgtttagcttaacgcactgggccaccttttccacgtcaggcgagtccgggaagttcttctgcaaagccgtcctgatgaccgtgtttttacccatgagaatcgtcgccatgccacgcagggaatggcgcacagaagccatctgacgcgatcccacgtggtccacactcacaatcaaaatcttcgagtacgtcctcatcaaactcgtcagacgctcaaaatacaacttcttcttctcactcttcgataccttcgccattctacaactcatttcaaccatcttcatacttaattattcacattatttatactaattatattatattaattaattatattaattgtataaattgattatataaattgtataaataatttattacaaaattatgtagagaaaattactttggagatacgataaaatttgtggtttaaaatgttaaaaaataattatggaaggggttgagattgaaatgggatggtgggacagatggggtggaatgtcgtaaattgccaaatgattccaaaccaaacaattaccaaattaaccccaaaataataattaaataattgaattaatggtaattaattaaattgtggtaatttttaaataaatgccgtgaatgtgtcaaattagacaattcttttttttcccaaaatatatacattaatacattattatttttacattatatttatttattatgtatataaattttaaatatgaattattctgaatttggcacctgagatattcattttttaacactattttttccattacacatgaatttacattttatgttaggacatggatgaaaaatacaaatccctaaaatccaaacacggtaatttctacacttcacattctttacattctttacacttttattctttacacttttattctttacactttacgtaattatacacctgagtattaaatccttgtttagaattgttgaaggaggggtttaagaagttgtatagtgactatgagactgtgaagaatgatttaagcgcgaaattggaggagttttccaaactccacgaggaaaactctcaactcaaacacaactacgatcttctactcaatgaaattaatcaacccacagtatctccccctcaactctatttacccctatttatccctattcacttatttacccctatttacctatttacttatgattatttagttaggtattgtgtgttgggacctggaggtaccgggttcgaacccccgtaccaccaaccatccaatatcccatccaacattcttaatatttcgtaaactcataatcacactactgtaacaattattacacggttaaatatttgttagaggttgaagggcgtgcaatcgtggacgaatgcgttaacgttgatcaagggcgggactgacaccgatactcagaaatacattgatgaaattaacacactcaaagccaaactcgaatccactctcaaactcacaggtattcacaacccattaacccattaactcgttaattatattaattgtgttaactcgttaactgtgtaaataatgtgaataatgtgaataatgtaaattgtgtgacagaagcaatggatttggagaagagagagttggagcgtgacatggaggacatgaaggcgaagcacggtgttgtggtatcggagttgaaggataggttactgggcctggaaagtatcctcaaggatttacaggaacagctgaacaaaaacgaacttaaactcacacagtacaccagtgacatcaagtcactcaacaccgaactacaacataaaaatcatcaaatattccaactacaactattgtaactctcttatctattctataattattgtagtatatagttatttattatatagttacttattatatagttaggggtatctccctatggcagtcccccggggttgaactatccgggccaatttccgcttgactttaattgtgttattatgtgtaggatggagaattctagaactgcgtatgagtctgaaaagctccagtgggataggaaattaaatgaaaaattcaagtttgaccttcgcagaaatccacacattaatctcaacaactcctaccaaaataccacatcacacgtattcacactttaatctactcagttaccacagttatagtagtttactcattacaattattacagtagttaagttattacacttgttaacttattacattagttaggttattacagtgttatgttgtgttataggagatgtgtgtggatggtatgagttgtggcgagttgagtggaagaataattgcgtcattgagtgaagtgttcaagagttggagtaattgtctcaggtttattccatccggagttagttcggatgctttctcaaccgaaagtgactgcacatttgtcacgctgttcactcaggacttacatcttttaaggaatctcgattctacaacacgtgaagtaaccaattaacacacaattatgattagatcgaggggataatagtgaagatatgccatgggctggagttcgttcaggccactgggtacttcaaattattcctccaggtaatgaaatattaataaaatttggttagttaatgaaacaattgatcaaacatcagaggatttacttttgcctcgagaattttttaacacattttaatcctcaggacggtggcaacagtggcaccattggcaacagttgtacaagtgtcaccagtggtgaagtaaatttaatgtaagtggttgggtaaattgttgaaaaatgtgtttagaagagtgtttggatcgtttgataaagttttaacgaaattataccaaagattcaactctatcatctgtaacatttttataccactacatactctttattttacccctaaatattcttaattagtgttaattttagtcttaaaatagtcatttttacccctaaatagtctctaaatagccttaatttacccctaattacccctaattacccctatttacccctaattacccctatttacccctatttacccctatttacccctaattacccctatttacccctaattacccctatttacccctaattacccctatttacccctaattacccctatttacccctaattacccctatttacccctaattacccctatttacccctaattacccctatttacccctaattacccctatttacccctaattacccctatttacccctaattacccctatttacccctaattacccctatttacccctaattacccctatttacccctaattacccctaatttacccctaattacccctaatttacccctaattacccctaatttacccctaattacccctaatttacccctaattacccctaatttacccctaattacccctaatttacccctaatttacccctaattacccctaatttacccctaattacccctaatttacccctaatttacccctaattacccttaaatagccttaattttggccttaaatagccttaatttacccttaaatagccttaattttggccttaaatagccttaatttacccttaaatagccttaattttggccttaaatagccttaattttggccttaaatagccttaattttggccttaaatagccttaattttggccttaaatagccttaattttggccttaaatagccttaattttggccttaaatagccttaattttggccttaaatagccttaattttggccttaaatagccttaatttacccctcagttacctctaaatagtcttaattttacccttaataatactattaatatgttgtagacatgacagagttacaaagtgtaaactattctacccttttaattaatgaattaatcaaccaattctcctcctccaacactactcacactcccgacactaacacaattgaaagtaaccctactgacggtaaccctactgacggtaacacaattgagttattgcttggaaagtgttacggtgtggtgtataatttgattcgtgagatgtgtgttttactgatggagttgcgtgagatactatcgcataggatttgttaccctaagattgtcaagggaatgttcctaccattcaccggcggcactaagcaaatggtacaactctcctcctcaatcacacatttacactcacaactctcatccatcaccaaatcacgactcaaaacccttttcaacaagattttcaaccgtaacacccgttgtaacaataacaataacaataacaataacaatagtattagtagtaatagtaacaatggtaatgtggtgtcatatgttgtgaggtgtaacgaaaagttgttgagtagtggattgaggatagatttgaagagtttggagagtgagttggcaaagttaaagcggagtgaggttgagttatcggagttaaggttaaaatacgcaacggcgcaggaggaactgtcgatagtcaggctgaactcggaaaattacctcaaggaacttgaatctctcaaacaaaccaaccacatccaacacatctgcaccaaactcttccaacaaactttcaacaaatactccacaaacttttgtaacaaaggtaatttttacactatttcctggttcccagctaaatagttacataatttaggagttacccaaattaagccagttttggccctaacagtactatctaccgtgactaatactctctttagaaccttttgcgaactctgtagaagcttctgtgacctctgtagacgcctgtgttccctctgtagacgcctgtgttccctctgtagacgcctgtgttccctctgaagatcctgtgtctacccatttgtacatgtgtaaattgatgaacaatgtgagatatttgatgaagatggtgagtaatttggaggatgtgaatggtcagttaaggctggctttgcaggtgaaccgggaccagtaccgcctggccaaggaaaacgaagacgccatacacagaaactacaacgaccagctcgtcctaatgagcgaacacatcactgaactaaacaacacaatactcaacagcgaatacaaaatcgccgaactcacacaaaccaaagtctcatgcccctcttgcggattcaataacaccctcggtattctctacacagttttatatagttaatatagtaataataatagtataataatagtataataatagtataataatagtataataatagtataataatagtataataatagtataataatagtaatagtaatggtatagtaatggtatagtaatagtaatagtaatggtatggtatgtagttaggagtagtgagggtatttcagggcatgtcaagctgtactatagcactgtgtagatagttaattacttttatttataaattttctgatccttaacaatgttaaatctgttgatttatgtgaaaatttggaatttttggaatttttgaaaattttgatttttggccaaaaaagccccgggacccaaaactgacatttgggttccgaaaaaaaaaattttttcaaaatttttaacgaataaattaaataattccaaatcattcctattgatgtttcagacatcaaaatgcttttatttatttctaaaagttagtttaaagtatctaaaaatcggttttagtgtgtactccaggactgtactatagtacctttaactactattacccagctattagagcgaattttactagttattagcctaaattaacgctaatttaactttaaaatagataaattatcctaaattaagttctataaaacaactttttaagctaaaaaattcctataacactccccctaaattatgaaaataaacataaaattccctaattatatccctaatactactcttaaaatccttatctaaacatctacaattcgatatatttactatactttgtagttatttgcttgacatggcctggacaacccactcctgagaacctacctaaacccctaaaactaatatttacacccctaaaactaatatttacaccttaaatatactgtttataccttttactactatttacactgtctacatatgccattagattagtataattatattagagcattctagatatgtgtacagctacgttagtcgtatagtagtgttactttaccatttaaccccttggatagtatactgttgaaccccttggatagtatactattgaactcccgtgtatagtatactattgaactcccgtgtatagtatactattgaaccccttggatagtatttctgtaggatctatgatgggtgtggatgataagggccgttgttcgtcctgccgctgtatcataatattttcctccaactagtccacactacactaacattttttactcaatattatctccactaatatctccactaatatcatctccactaatatttgatatgaagaacagacctgattatgacattagtaaactggtgaacaattcgtgtgtaaagagatgtaacgagtttataccgaaatttaaggaatcaactttacaagtggaatctgacattaaacagggaaaattaaacacactcgactcaaacctacaattatacacccaggacattaaattatccgaagattccaactatttacaagattccaactatttacaaccatgcgaacccctggaagactccgaacagtcgattttcctcggtaaaattgtacaattttatgattatttgcagatgtcggacttggcgtatttgacgttaagggtacaacgccctcagaagaagccttaaaagaagctggagtcgctctgttagatattaaaccacaggtaaaccacacataactatacataaactatacataaattagtcataaattagtcatagttaaggaataattgagcaatttaggaaaaagaagtgataattacggaagttaagagtaaaaaatttacaaattctaactaacaataaaatattatttttctattaatttattaaaaatttgatatataaatttattttattattctattgattggcttgtttttgtccatttaggcttaaagttaacaattctacacactcatggtgcattacacatcctcctaatttttatacttaatcattttaaagcccacttttgattttttataatttttaaagcccacttttgattttttataatttttaaacattaatttttattgataaaactgtgttggggatggacctgagtatgaaattgcgtaatttattcctggtgatggatgctaagaaggaaggcgttttgaacgaggcgtcggtggttttagctcttcaatccataggatttgtagttcccaacgacgtgaagtcgtcagtttcccccatgaactgcacggaatttatcaattttggcactcagctggccaagaaattaccctccgacggcggcgtcggggacttatactcgtcactcgccggctccaagtcaaagaaagttgaaatggccgaagtacgccaagtcatggaaacactcaaactcacaaacccctcagacctagacgttctctcctcactcttagatcccagaaactccgggtacctcgaatacgattctctccacgaagcctttaaaacctaatatctcactaatatattatatactatgtattatatactatttatttggtatatctgtggtatagtgccgtggtacctggcggtactacctgagggtagtttgttcaggtctggtaatactatagcctgtcctggcactaattacctgaatttactcgttatagtattgtaatactactaattatacttcatatgtaaacccagacacgtgataccactatagtatatatatacactgtataatatgtgtatgtaatatggtatagtatttggagtatctttagactactgtacctaagaatatctttagactactctaactaagaatactacagtagcatatgatacagtaatgcctatgatacctaaacccagacacgtaacactatactaccatactaatgtaccttaactatatatttatacatttatagtagaatttctatactatatactcttaactatatactcttaactatatactcttaactatatactcttaactatatactcttaactatatactattaactatatactattaactatatactattaactatatactattaactatatactattaactatatactattaactatatactattactatatactattactatagtattatacctaatatatttaatatacataatatagaatagtgtataaacatgtgtataatagtgtgtatgtgttattggaagaaattattggattgtgctgtgaatgcgagatctccgatgtgtatgattcctccttcttttaagcctagtttaatcagtttcttgttaactttattggcctttaggatactcttgagcttgtccatagtctcgggtaagtcaaacctcatcatcttaatcttccgctccaaataaggagaggatatcctaaaagcaccatcagactcacaagtcactgtgaattttttcctgtccaactttctaaagtcgtccaagtcgtcaaatttagtcacactgtcaccaccatcagtagtagtagtgtgagtggtatgggatgagtagagtttttggaagagtgtgttgataaagtccatgttctcaccggttttcgctaaacacaacaataaaacctgttatattttacctgacaggaagtagatgtggttgtggtttgtgtgtttgaggaaagtgttgatgagtttgaagatcgtctggttgtcaattaagtcaattttattcagcagtattatctcgtccttctcaagtatctcaggattgtacaactccaactctctcctcacagacatataatcccccaacgggtcctacaacacatttccacactatactcataactactgaatttactaatttaactactgaatttactaatttgactactgaatttactaatttaactactgaatttactaatttgactactgaatttactaatagtgtaagaatacttgattggaggaatcgatgacgtatgagagagttttggagtgttcaatttgccttaaaaagtcatggccaagtcctttaccctcacttgacccgtcaattaaaccaggaacatccaccaaacttattctgtcccccgggtctgtcacatctatttgttcttctgtgtcatctatttcttcatctgattcatatccgcagctgtcaaattcatcttctgtctcctcagtttcctgttccacactttcggcactgccaaccttatcaacctggttagtatcctgaaggagttaaagtgtgtaaaaatacgtgttgtgtttggttgaggatgccgtggattgggaatctggtgctgaatgggaaattagcaactctaggcctggcatttgtcaatctccttatcacagaactctttcctacaaattatcagttcacagttagatgattgtggtggtaccagagttgggcttcccgatgagtgcgatgtcggagattttcttataaatcaactttacaactctctttatcccctcctctcccctctcacatatccgaggcacaacattactaatccattcacactattaatacaatatataaacactgtgtaaacactacactaggtaaacaatgtgtataaaatgtgtaaaaaatgtgtaagtagtggtgatacaacttggtgatgaaatgtttattgcctttgccgcctctaccgccgcgtgctactctcactttatcgcctaaacttgataaattgtgtgtgtaataccgttacggtgtagtgtggtgtgaacgttactgtcagatacgacagtaccccttggtacatataaatacatgtccttacccttggcctaatatacatgtaccaattttatattaagtatttagtagtgtgtttgagggtgtaaataggtaatcaggagggtggtgtccaggccatgtcaagcacatagctatagtaaatagtaagtagtaaatatagtattgcagatatttagataggattattttagtagtattaggtatataattagggaattttatgtttattttgttaatttaggggaacttgctaggattttttagcttaaaaagttgttttatagaacttaatttaggataatttaagctaaatttagtgttaattaagggtaaatattggaaaatttcgctctaatagctgagtaatagtagttaatagtactatagtacagtgcccaggtacctacaattacctaaattttacatagctaaaaacacttttttataacaattttaagcattttgatgactaaaaagatgtgctaaatgtgttaaaattgtttaatttaattttctaaatagtcgaaaaatttttatttttttcaaaacccaaatgccacttttgggtccaggtcaaaatggccaaatttcgaaaaaatttttttaaactaattttaactcaaatcactcaattaatcattgttgagaatcagaaaattataattaactcgtagttaactgtgtacacagtgctatagtacggtttacatggcccggaaaataccctcaaatacgtaatataactattattattatagctaatacaattatactatagaactaggtaataatggtaaatacggtagaaagtgcgtacgccgttcctgttggatcctttcccgttattgccgttttgtgctttatatattttatttgccttgaaccatctgagatcgcttacggagtcgttgcactcgatgtaaacgtcacctcctggtccgccatttccgccgtttgctccgcctagtggcacgtgtttctccctcctaaaggacatacagccgtcaccgccgtcaccgccactcacttttatcacacacaaatcgacgaccctgtagtcactccagtctaaaacaattgtacagcgctaaaaataccatttcccagtaaattcacagaggtgtttacagaggaatttacagaggtgtttacagagttcacagaggtgtttacagagttcacagaggtgtttacagagttcacagaggtgtttacagagttcacagaggtgtttacagaggaatttacagaggtgtttacagagttcacagaggtgtttacagagttcacagaggtgtttacagaggaatttacagaggtgtttacagagttcacagaggtgtttacagagttcacagaggtgtttacagaggaatttacagaggtgtttacagagttcacagaggagtttacagtgtgattggaaggatttatgaagccaaatgacttaattttacaaatattcaaatttgttttatttggaattagtttacaattcgtgaaaattttggaattgtcaagaagtttacaattctcaagaagtttggaattattgaaaagtttacaattgttgaagattttggaattcgtgaaaagtttggaattgttgaagattttggaattggtaaaaaagttgagaaatgtgtaaaaagtgagaaatctcaggattccaaaaattctcatgaatcatcattaaaattaaaattattcataaaaaaataattaataaaaatattaaataaaattttatgaaattaactgggagttaattagcaaattctatggtgacacaataaattgatgttatatggtatagtaatcatcgaaagcccaggggtttttatctagaaagtcctccacggcctcctttacatgataattcggcaccaagtcactcatcttacacagctccctaatttttatattattattattttttacctggtgatgggatcgtactcaccgttacacagcaaatgcgtctccaacaactttctctcatacgtcaaaccactcgacgatatcaccggatccctcatcaaacactatataacactataccatactatactatacttaactatacacagtagagatgagtagataaaactgtgtaaggggtaccatggatattttacagcagaggtatggcgggatatgtttttcttttgatttggcgatgtagtttctaaagtgttcgagctgctgaatgcgctctccatactcctccaactccatcctactctccacacgctcacgctctatcaggtcctacacatatctacatagtatactatttactatacaactatatacccctagagggagctactttactatataagggagagggagagggagctactttattatatacccctagagggagctaattaaataatacccctagagggagctacttaactatatacccctagagggagctacttaactatataccccaagagggagctacttaactatataccccaagagggagctatttaaatatataccccaagagggagctactttaactatatacttacgaatacctagtaaataatacttaaaatactataaataaaacctaaaatacttaatactataaatagtatagataaaaaatgttgaagaatacgtgtatgaaggtgtagaatgagttgagagtgttattgaattgtatgtcttgagattcccagatggcttttttcgcctttaatatttcattatctatttcctctatgtacggcaccttgtaatgctccgataaacacttcgccttcctcaacttcctcatcccctccacagggtctcctaatcatacaatcaaccagatgtacactatataaacattcaatacagtaaatttaagggataaccgtgataaggaactgtgttaaggagaactgtgtgatttgtacctagattgagaagtgcttgtccaaggtaataatgggctttaacggagttttcctccagatttaacgcctgtctcacatcctgctctacctacacaaaatcacattatcaccagttttaacactataattctcaatattaactgtataaaaagtataactagggtaaaaggagtataactagggtaaaaaaggtataaatgaaaaggtgtaaagagttacaagatcccatttattttgttttttgtagcatagagctctgttggtgtagaattcgtggttgtgtgggtaagttttgatggctttggtgtagtagtcaatggcagattcgaggaatccttttttgaagctttcgttgcctaaattccggaaatcctcggcctttctgatgatatttctgtccttggggaactcgatgttctcgctggctgagtaaatcgcgtggtcaatgtcgttaaatgttatgttataaaacgtatccggcttcttctcctccagggaatccaaacttatcatctcctcctccatactcaggattaagcattcacacaattttatacattatcacatatattttgaagaaaaattaatttaactattttccagataattaatttccaattcatctccccatagctaatcaaatcactcaaacctctccaactcctcagtctacaacattactcacacaatttttgaaaatttttaaattttttaattatttgataattttttaattatttggtaatttagttaattatttgtggaatagttgaaaatttgataaataattgaaattagttaattatttggtaaatagttgaaaatttggtaaatatttgaaaatttggtaaatatttgaaaaattgtgtaaataattgaaattagttaattatttgtggaatagttgaaaatttgataaataattgaaattagttaattatttggtaaataagttaattatttgataaataagttaattatttgataaatatttgaaaaattgtgtaaaactgtgtaaagggtacggagagcgatttgatgagttctgaggggtgtgtggattcgaaagcaactttataagtgacgtgaaacagcggaaattcggccaatttgtcatgcgttctcaacacttcatacacctcatgacacgtcgatacgccctaaaacaattctttaacaccgtagaatactatggaatactgtaaataatacccttaactactatagcttaactactgttaactactatagagtactatagaatactattaactactgttaactactgtaaataatactatggaatgttgtaaataatactatggaatattcttaactactatagactataatacagtagtatagagtattatagaatactgtggaatattgttaaccgctatagcttaactactgtggaactatactatacctaagatacctaatccttaactactatagcccattcttaactattatgctatacctaagatacatggtccttaactactatagcttaactactgtggaataccatagaatactgttaactcttaactactgttaagtactgtaggatactatagaatagtcttaactacatagtaatgttatataaccttaactactcttaactactatagaatagtcttaactactatagactactgttaactatagtaatactcttaactactatagactactgttaactatagtaatactcttaactactgtaaatagtactatagaactgttaactactgtaaataatactatggaatactgtaaataatactacataatggaatagaatacagtggaatagtatgtaacaataagactagtagtgttatacttgtaacttttgaccgttgagaaactcttgttcgatttcgttccaggaccttttcccttctttagccgcgaactcagcggcacatctcacgttcctgccaccaatacacgtcgttatcaagtccgcaacgccagcactctcaaacacgacgtcctaatcataactttagtactatttacaggaaatattcaagcgtatactactaagtaataaatgaccaaggaacccacaagggataaataaaccctatggagtgataaataactgcggaaataaatcctatggagtgataactaagagtagaaaaatctgtgagcgcatgcaagccccgtacctcagtagtgtttggaaagaagagtttggcgaatttgtgtatttcaacgagtccaatacgcataactgcggctttggtattagagccaagtccaagtccgtcacagaacccggcggaaagcgccacgacgttcttaatcgcgccgtaaacctgaatcccagccacgtccttaatacaacggattttaaagtaaggcctgtcaaataatctctgccataaccttccctcatccctagtcgtatacgccaccgtagcctcactaaattcttccctagctatacactacaacattttttacaatgttaacaatattaatagtataatagtatgggacagtggagtggaatatacatatctaatgtgaatggcaaagtcaagcgggaattggcccggatagtagtgaggcgggggaccgccacggggagctaattaactatataactaatactacaataatatactatactataactatactatgctatgattataactaaatataaatagtatagttatagaatagttaagtgttgtaaactgtgtaaatattacgtttgcgacgttggccccggagagagcggagcaagggatcccgagttcgcgttcaataacgtcagagactaaaacgggttcattatccaaaatcataatccccttcaccaacgataacgccacagcctccttcttcattaacccacactccctcatcttcacagccgtactctatacacataattgttagtattacatactcaatattctatagtatactatagtatagataatagtatagataatagtataattaatagtataaatgagtaataattgtgtgtagaatactttgacgaattggtgtggaatgacgaagatgaagaggtcggtgtctttaacgcattcgttgagatcgggtacggcgaggagattatttggcagcttaatccccggtaaatactttttattctcatgcgtagtgtttatcaactcactcaatttcactccctccaccaactcctccaatacccacatccgtacctaaacacatatttatggtatttccacatatttacactatttacagtatgtaagaatgtggtatagagttaattaggagagttaaatgggtaaagtgtgtgttacggtgggattgaagaggttgaatttgggtgtgttttcggagatgactttggcggcggcagttccccaattaccacagccaacaactgtaacctatgaaatacgcaataaattaataattggttaccttctttccggccattctgagcagtgagattcccctcttcgcaaacaattttcacaaccccaaatttaattatcgaatagaattaatattgtcagtagtatttttaatggaattttgtgtctaaaaagtttttatagttaattatttcactacccagaccccatcctccctccctctcccctcctaacatatttaatattcatttaatattatttaatattttaatattttaataatttgtaatattaaggattttatcgcaattgggggaaattagaggtgaggaagtttgtgagatgagtgacaggagttggatttctgaggagagttcaggttccgacttgcataaaagtaaacaaagtttatctaattccagtaattattcacttcattcctctcatacttccaataggtcaccacactccaaatcttcactacactcttacaggtcactacactcttacaggtcacacaaatccaggagatctcacactcgtagatcacaccgtacagggagatcaccagatagatcacgtcataggagtaaatcacaccgtaggagtaaatcacaccgtaggagtaggacataccgtagagggagatcgggggatagatcatacggtaggagtagaacacgccgtatcgggagtatagatagaagtaggagaagtagtagtaataattatagtcagaaaatagccgaaaataaacattatagatcacaacatcactcccacactcccactctcaacaccaacgtatctccacacacctttacactattttacactattttacactatttacacattattacaaagtttacaaagttgtacaaagtaataaagttgttgatttgtgttttaggagaagaagaggaagtattactatcaacagaaaccaatcacactctcacgtactatcccatacacttactataatactactataatactactataatactactataatactactataatactactataatactactataatactactataatactactatattagtaatagttaatgatttgattagctgaggagggtgagatagaggagttggagttggaggatgaggacgaggacgtggacaagttcctcgagtccagacgacaggaacgacataaactcttactcaaacattccaaaccccttcacaccgatttatcacatactgaatcctcagaacaatctctacagagtgtacaatctttacagaatatagagagtatagagaatatagagagtatacagaatatagagagtatagagagtatagagagtgtggaggaaaatatggttgagaaaccagttgaagaaaaagtaagggaaaaaagatgtctaaaccccttttcactattaatctcacatcttaatcctaatactagtgataaacaagacccgggaactccagacccagacattacagactccggaacgccagtacggcaatctgaggagccagatgttagtttggacagtgcaaaagagttggaagatatctcacccatttcagtcacactctctcccagagactatactcccagggatatgactcctaggaatagtactcctaggaatagtactcctagggatgaaactcttagggacgacacagtaaatgagatgactgatatgactaatgacatgacttatgtgtattcagatttgcagaagaagttgatgttagagaaacagaagttacgcaacttcatcatcaacatgaagagatccgaacaggtaacaccccaaccacttttaaccttaccaactttactactaactacttactaactctactaactttattattaactttattattaacttaataaatgttaaatgttagtgtaggatgagttggagtatgaggaggacgaggatgacatggacatgtttagtacagcagtagacgagagtacggttaagaagaggaaagtcctcaggcgtgttattactaataaactagaaaatcgctcactcgccgaaaattggaatgattccgaagggtactatcaggtcagttacggtgcttgcttatccctccgggggtactatctactcatatccacactatttactcattatttactcagttaattcataatattaactatatacccctagagggagctacttagatatatacccctagagggagctatcttaatgtatacccctatagggagctatcttactattaactatacccctatagggagctactttactatactattaactatacccctatagggagctatttaactttatacccctagagggagctactttactatactattaactatacccctagagggagctactaactatatacattactatataatattaattatgtaatatataggcaatgattggtgaggtgatggatgaccgttacagtgtgataagtgagttggctggaaaaggtgttttctcttcagtattaaagtgctacgactcggtggacaatcttaacgtggccatcaaagtcatacgtaataacgacatgatgatcaaggctgcggagaaggagatggacatcctcagacgtcttaacgaaactgacaaagaagataaaaaacatatcgtacaactactaacctcttttaaatacagaggacacctctgcatggtctttcattggtattggggaaatctcagatcacatctcaaactgtataactactagttaccttatactacttatatatttatataatattagttattgtagtattagttatatagttaattagctccccttggcagtcccccgcctcactactatccgggccaattgtcgcttgactttggagttcacagtagatccgtacaactcactccactatcccataccattttactattaacattgttaacattgtaaattggattgttataggaacgggaagggatatgggttgaatatatcatatgtgcattcgtatacgaggcaattattcattgcgctacgacacatgaaaaaaaataaaatcatgcatgccgatcgtaactctctattctattctacacattcttacactatttacatatttacacacatttatagtattttacaactgaatgtattatagtgaagccggataatatattggtgaatgagggttataataagttgcggatatgtgatttgggatctgcgagtgatgagtcggagaatgacgtcactgcttacttggtcagtcgtttctacagagctccagaaatcattcttggctgtagatacaattgtaaaattgatgtctggagcgctgccgctactatctacgaactcgccactggagatattctctttccggtaactcctttacggtgcttgctaccgcacacaccattaatacatatttacctcacacacagctaacacatagttactctctttttactcccagggattatttccttagttatctcctggtcttgttatatagttaattagctccccttggcagtcccccgcctcactactatccgggccaattgtcgcttgactttggtgttcataggggatccttatctaccactgtactattccaactcactatagtatttatattgtaataaactttagtaatagttatatataattagctccctttggcagtcccccgcctcactactatccgggccaattgccgcttgactttgccattcacattagatattaccataccactcgactattcaatacatattactatgctaatttatgattagggtcgtaacaataatcacatgttgaagttgatgatggagtttaaggggaaggtcccgagtaagatgattagggcaggtcaattctcttcacagcactttgatgagaatttagactttgtgtacacatccacagatcctctaaccaagaccacggtgaccagggtgttacaggacctcagacccacgagaaatatcacagattgcatcttcgagagacagccctggaccaaatctaactcacccaagaaggaaatactcgtaaagaaaatccgacaactcggcgaactactcgaaaaatgcctcgtactagacccaaataaaaggttctcacccgaagacgcacttcaacaccctttcatacggaattaacaggctatcatatggaattaacgggctatcatatggaatcttttactgaaattggtcatctcaaacatgtaccaattaatatatcaaatttacttatataataattaatttatatagtaatttatttatatattatttattatttatatattatttttatgatgtgtgtttagtttttagaacagcccaggagaatcgcaataaataaccgaaaacgtattttacacaaattataatataataaatataaaaaataaataaaataaatttttagttgtgatatataattataaggaaaagttatattgtacggatgcgaattgttatcattctgcgggaagactggaatacgtatttttaacttggtataaaatcatagtttagtgaggatatagaggagattctaggccagccttgtattcggtgtccacagcataaatatgtcatctcaatatccactggagaatcattttaccgcccagtagaagtgattcaagtggaagaaaatggtagactaaggaggaaagtgctgttactagactggaaatccaagggaaaatgccagagaacacacgaagtcaaggttgaaaatgataaagtctacgttaagctagatgaatcaactgacgaattaccctctgataaatatgcatttctctaatacacatcatgtattatactatgttcatatttatattcatatgtattatgtacaatagttagtatattaaataaggtatgatagtgtgtatattatgtgtaagaaatagaagtgttcattagtttaaagaggtaattgggtgataagggttaaggttctccatgtgtgtttccagacgactgtcatgtctaggctcagtagaatgtcattagtagattaagttgtttgtgacattaagactcgttagttccagtacccaaccattatagtagtcaatctgattaatattttaaggacctaatttaaccaattcaagacataatcaagcgttaattaacctttaattaagcgttaattaagctttattaagtgttattctgtgttatatttgtataactatgacattattataccataccctactatactcatacatatatacaatagagtatataacgtatagtatcttaagattatatgtagtatgctataactgtagtttaaagtatttgaaacgcttaaaataaccaactcaattcttttacacataaatatatttatttaagagtaagataaagtttgtataaaattaattattagtgaattggaggcgttcgattaatttgctttgtagtgtctgaacaagattagaaagggtaaataattacatcaatgactgatagtgagttatcaagtttctctgcgcactttaggtatttattcacaacattataatacagccaatcgtacggattattatagtcgtcaacagctctaaaatgataaaattgtgtgtaaaattacgttataacgcccttgattacacttccaagatcatacgactgagagtaactatactcaacgagcttatgtaacttcttcaacgacttctcaaatttgtatctaaaacattattcacacaattaaccaatcttatattaaccaaataattgttatattaaccaaataatcgtgagaatatgtaaataatcgtgagaatatgtaaataatcgtgagaatatgtaaataattgtgagaaaatgtgtagaaaatgtggagaaagtgattacatgtgtttcatgagagttttgatgacagtgggatctgcgacgttatcgccttcgcaggtgactgcgattttggttaaatattcaacaactaaagaatcatttacaaatttaaggaaaaaaaacttgataaaagtaagtttgaaatcagttccttgacattctcctgagttaagttaagcttcgttttggcagtttcatcctcgttttgcgcctcgtcattactactcaaatcgtccgcagtattcataacacaatttacagccaaaactacacaaaattaccaatagaaggcaataatgaaaaataattattaaacaccatctgcaaatataaattaaattatttaaataattttattaattttaattaattttatgaatttaaataattttatcaattttgggataattttattattagtgttgaaaatgattggtgaatcattttccgaatgtttagatacacatctgatttgagcattgaggaatcacttttttcaggcctttacgtgataatttcaagaactgaagggacttccgatgctctctacaactccgctctaacctttttgaacaccaattttagcagtttttctgtaagggaattgttatctaattatctggccgatgagtttagcttaagtgggaagttacactttacaaaaaaggtcagacttggtcctactgagattttgtggcctgtggaacgggccaattccacgcccagagaagcgctcctaaacaacgcaaaatcgctctcgatactcgagagaaatgacattctgtcacatctaaccgaggattcaagtgttgatctcaagtttatttccgaggagaagttcaattcgctctttattccaaagttattttacccaggaaatgtcattgcaattgtgattctgaacgatgggacagtggattactcaagtttgattgacgtgttttacgagaaaaagagtttgtacggggataacttggctaaatttcagtttcttctctcagtatcgggggatcacactagggaccagttgctagaatcatttgacaaacacgtcgtaaagaatcgtttacacaagtttacacaagttaatcacgtctacgatccggatttaacttacgattccttctttctcatcgacaaacactgtgcagaggtgacacaacgggtatacgctgtgttgggggaaatagtgctgaatttgctcatcacaattgttagccaattgttaacacttttggatgatccaaaatactcactagagaacataaggaaatctctgacacatacacattcacattcccattcccacacccgcaggggtaaatcatattctggatctgagataaagcgttctggtgatgtaaatttaatcttgggtaataatctgacagcgatttgtcattacgtttgcgcaaattatcattttacaagtgaaaacaatcacctctcacatgcacaaactctttttactctttctgtcacactttttaaactttttaaccttaggattggaattgactctgtcagttcccaaactgtccaatccctaaacaaatttgccaggggaaaaactggtaaatctgtctacgaactgttgaagttagtgattgagagacctgtggagtatctgttgaatagtttgaagaggtcatttcttgtgtggctgaggacatctgactgctccgaagagctccaacttctgttcattttttacactaaactgttagcggattcagcactggtaatcccagtgatttcctcgtttgtcacttattgtaggagattaccgccggaacagcagctgaacgttattcagtacgtggtagacctgctccaaaacaccaaatataaacgaaaactacacttttatcaacatctaaaagattttatcaactgtgaaacacaatcaattgggagtaaactgtgtgaaacagaggatgaacaggatcttgaagtgttgctagggggtgtgacaaagtgtctggaaatgacgacagtagaccctatggccctggacatgataaaatattacaaaaattggtaccagattaataattcaataataaacactgagcttaacaatttgaggtatagctcagacatagtcctggtaaagcgggttttaaccctgaaactgtgtaacatactccaatccatacaagaacacaccgcaaaagttgatatctgtccccgtttacaagagctaaaacgttatgctaaactgtttaatctcacatatttaaccctatcacatctcattatacgcacacactatggacaatgtgacagtgtctgtagtgtgtgcaggattggtttggacgataaattattgtattttggcggttatgaaggtgttaggttgggtaaatttcctttaatttgttcaatggagttgagcagggcagacttgcatttccgcttctccaccctgaatctccgcttctccagccagaatcccaagaaaatcaacacaatcaataacaacttaacttttcacattgttcacactaggaagtgtaggcttcagtgtgaacacttgggatttcacattcgcaccaaaatcaaatccaaactctacactaccaacactacaaacaatgttaacaatgtaaacaatgtaaacaatgtcaacactgttggaaatgtcatcacggtaataaatgatttggaggatttggtggtgtatgttgacagtttgttgactgtggaggttgtaatggttaacccgctggccgttgatttaatgttaaaggacgtggaattagttggctcaggtgttccatttgacactgtgaaaacggaatttatagtcccaggatttagtagaaattatataaaaacaatcaatctcagggttaaggatgaggggacacttagtgtcctaggcgttaaatttacattatttgactttttaacttgttttcaactgctggttaatctggacaattcggacccaaacaccttcatatcaacactcaaatcatgcgaaacggggaatttcacacagtttctcaggttacccataataacatagttacccatagtaccatataccatagttatccatactaccatataccatagttactcataatgccatagttacctataataccacagttacctataataccatatttacctataataccatatttacctataataccatatttacctataataccatagttacctatactgcactaactagtgtctaataataccatagttacctatactgcactaactagtgtctaataatgtaatagttactgtataatactgctatagttacctataataccatatttacccatactacactagctagttaataataatgctatggttaataatgctatatttactgtataataccatagttatccataatgctatagttacttcataatgctatagttaataatactgctatagttaataataataccatatttacccatactaccatatttacctatactaccatataacacagttacctatactaccatataacacagttacctatactcctatagttaatacccctatagttaataataattctatagttacctataataccatatttacctataataccatatttacctataatacaatagttaataattgtatagtgtgtatggtatgaagatgcgatgtgtgaaagattgtaacgagtgtgagattggattgtttagcacggattttaaggataaagtcgagtttataactgctgcctcagtttcaaacacaccaaacactcttctgtcctccagaaccacatcacacagatccatctccacccggaccaccagttccataacttccaccggaactactaatagtataacttcgataaataatttacgtggagacggtggactgtgtaagagtgtgttggtgtgttctgaggagttgtgtgtggactgttcggtcttggagcagctgatgtcaaacatgtccgaatttacccaaaactccccgttactcacaggtgacagaagcttaatttatgtcaaattaagtaataaaaataagagccacaagtttactaatattaccgtgtcagtactgccacacgtgccggagcctagtgttaagtcacagcccctgacagccaaagattaccttcaattccaaatcctccaacagaaacttaaacaaatcaaccacatcaaattctcaatctatctccacctattcgccggtcacacaatcaaacactcggtagctagtaatagggttggtgtgggactccagttgttaccgggtgaatctctttatctacccctggtttacgtggcaaatgagttattttcaagttttgacgttgttttcgattatcaaattggtgactcaggtgtgactggaacgtgtgactcccgtttgatccggggaaacgcatacaaaagtgtaaatttcaaggtggaaaagagtatcaccgtgcaggagcaccagtttgtaccagtagtacactttaatcacaggttactcagggataatattgatttgtttaaggaatattatagtagttccaccctccagagcctaaaaaactccagggtaaaatacgataacaaatggctaagaatgttctttaaagttaataatgaaagtgataagttattttcctgtaaaatggggaacctggagttcatatctaacccaaacacctccaacaggtacagtaacacaatttatcatttccgtaggtaccacgtggatatccgtaaactcccctataaacgtcacaggaagtatcaaatacttaacctgtttaattccattcactggtcatgcaatgggaattttggtactattaaattgtttgaccctggcaatggtgttacttcaactgagttgggtgataacacacccagactgactggcaagtctaagctaacgcaatggtataaaatgtgcctcgaaaggttaatacccatgaatgacttgatctattctaagatatcgattaaggtgttaattactgtggatggcagggttatggctggtgacacccttgcggtgggtaagtattttacggtaaatgtgctggcgaagaataatggaactagacccatcgccgattacaaagttgtaatcatcccgtttacctacgatttgtacacaaacgtcgagaatctactgtggtccggctctctggaacaggtgggtctcgaacctattacacccggttccaccagttgtatcagtaccactaggccgtacaggacagtttccggagatgtgaatggagttgatatgtgtaacgtcgtggagtgggagggttactctgggtataaaaccgttgccacggcggaattagtagtaaaacagccttgtaaattaagcattaacgcagccatcttaaactccaaccaaaccctttttcaccataaactccactccatcaatttttttacactataataataataatgtaataattattcaataatttaattattcaataataatttgataatttaataataatttgataatttagaataatttgataataattatgagtgtggtattgcctgggatgttgcttggtacggtgagtgactatgtgccgttacgcaacgtttacgtcaaggattccatcatctactcatcagtcctcggatcacaacacatctcaccaaacaacgtattcactccactatataattataattattatagtaataatgatgataggagataagtgtggaatctgggtgtgtgagggttccgtatgttggcgcggtggtagtggctcagatatcaagagtacatataaacaaggcggactgtcacatcatcgcagtcaacggcagaaccctcaaggaccaatacaaagcctctctcacgtaccttttactgtttttacacaaatataactaataataatttaatttatattaataatagttaatagtaatgataatttgtaggagtaacaatgtgttggaatcgaagagcatagagattttaatgtatgaatggttccgacccggtgatttcatcaaggccaaagtggtaatttctacacagtttaccaattatttaccaataatttacacaatttaccacataatttacgtaattgagtacaaaattcccatagatttatgctggagatggtaaggtgtttacgctttctactgcggggattggtcttggtgttgttaaaaccacttcatcaaacggtaacacaatagttagtaatggttattttaggggaggagatggtcccgatttcctggaagtatttcatgtcaaagaagtccggcgcactagagaaaaggtaacacaaacccactcaaacctcttaggaaagtcgcgaaatccatttaaccacgtcaacacaactttttcaccatcacaacgtagtgacacactggaataaaaaagttctaaatagttaatgaaagagtaaaatattaaagtacaattgattctaagagttccataggtacttcccgcttccccttttttacactttttaccccttttccagggctttttacagtttttttaacgccaattttaccctttttaacgctaattttatctttttttacatcttttccagagctttttacggcttttttaacgctaattttatctttttttacctcttttttacccttaataacttcaatttcaccctttttagggtcaatttcaccctttttaacttcatttttacccttaataagttcatttttaccctttttctgttcaatgtgttgttcgactttttcttgttcgagttgttcgagatagtgaagattgcgtttcctttccttggccaggacggagtgtagcttctctttacgttcccgtttggtatttgaccagtattcgaccaagtgtctccatttaaacttgggtaagtactttatgttccacaggtcctcgcgccagaagctgtgcctcttatcctccacaggcttgttatttaacattttggccacttgtttggccacttttttatctgtgaactggacccagccgtgggtaaatttaaggcgcctgttacctccagatttaattctcttgttatactcagtaatcgactccggatgacagtaaatcttccctacagcgccaaaatttgaaaaatacgaacgtaacttcgataaacccataaacggaggaattcgagatatatacactatcccactctgatcaaaatcagattcatcccctaaatttgtttttacattattccctaaattcatttttattccatttggtaaattattcgataaattcatttttatgttatttgataaattgtttgataaatggttgtttggagtggaatctgaaggttccaggtgatccgagtgttctggatcagaaattgaattattttcagaatttccaaattccctcaccaattccatccctaaaaattatattcaattttaaaacatttgataaattatatttaaaaaatattattggttgatagattaacccacgtgaggataagtttaaaataattaaattattttaatgttcgcaaagtttattttttcccttcagagttccaaactttttactcacacaattactaaacgccttttctccactgctaacactcggaataatcttcacagtaatcttcacagtagtactcacaatggtataaacagtggtataaacaatagttttcacagtggtatatacgatagtgagctccctttgaggttgaaaacgggtaaaattacctactacgacgttttacaagttcccgcaaacgcatcccaaagtgatatcaaaaaggtactcttccctattataacttatttgtgttggtcagcttggtaatgtgggctataggcgtttacgagattggcgaaggagtatcacccggacatgaacaagaacaaagatacgagggcaattttcctatgcattaaagagtcacacgatacactaaccaatcacaacaaacgcattctctacaatcaatctctcaagtaacactctacacactttagtccaaacactttactatcttaactctagttcttatcttaactatactatacctatttagtcctttactatcttaattttagttcttatcttaactatactatacctatttacttcctatcttaactctagttattaccttaactatacttattatcttaactttagtactttactaccttaactctagttattacctatttttactatacctattattacctatttttactatacctatatagtcatttactatcttaaccttattactttactatcttaactctagttcttatcttaactttactatacctattatttagtattttactatcttaactctagttattacattagtctagttactaccttaactctagttattaccttagtctagttattaccttagtctactatacctattatttagtactatacctattatttagtactatacctattatttagtacttagtacttactactatactttagtcctagtcttacttagtattctagactctacctcttaataccttagtctagccctttatatcttagctcaatttcctaatactatagtctaattcttaactactatagaatcaatttcctattactgtagtctactttctattactatagtctaattcttaactactgtatactcaatttcctaatactatagaatcaattaccttactatacactaacttattccgttttatagtaaatctgctgacagtgttcgctctaaaatcttacgtagaccctcaggaacaggtaacacaatcaatttattacttgtaggaatggattctgcccgctgggagcgttatgaacgatatactaaaggggaaagaaatgattctctggaagacccacacacctggatcaaaattgtaattatcacatactctaacattaccagttgtatatcattgtgtagatcggatccatagttgtttcctgcatcaccgtttccattggatgtctcatcttcggacatattctcacacagtttccctcctccaggtttcacactctacacactaaactattactaccattacacacttttctacacactaaactacacacttacacactaaactacacacttacacactaaactacacacttactattacacacttactattacacactaaaatattagtaaattgagttatagtgtggacgacgtgtatgatgtgggatcggtgcgggatgagcgtatggtggatgcgtattataatccgataactgagcgttgggagcggatcatagcgccatttgcgcctccgaatcccgaggtgctaatctcacactaccaacttgacacctcagaactgaagataccacagaaactcaccactctacgggtaattaactagagttaataatgtgtcagatgccactgagacttacaacaagacccacaatactttacgataaaaataaacaaaaacctgtcctcatacaatcctaacagttaaatgataaggtaaaatgaactaacgtaaactgaactaacgtaaactgaactaacgtaaactgaactaacgtaaactgaactaacgtaaactgaactaacgtaaactgaactaacgtaaactgaactagggtaaacagaactagtgtaagttagattaaactgaactaaggtaaacagaactagtgtaagttaaactagtgtaagttatgagattatgaggttaaaattctttatcagagttgtagtgttctaaagatttcgtgtccgactcaaatcggcccaactcctcctccgacacaaactttatatgactcgatatatcacactgatcctccaaatccacattttcatactcttcacactgatgtaatgactcggtcaattgttcataggattccgtaaatggttcataagattgtgtaaatggttggtaagactcagtgaaagattgatgggattgaagaggatcagagtgtgattgagtgagtgggggttttggttcttgtgtgtctttggggttaatgtcgttttggtgcgattggtagtttttgcaaaagggcggaatcatggcctggtactccggacccacacggatcctaccatcaaacgactgcatccactgcctcttcgtctccatacgcacacacaaacacaaatttacgaagtttcacacagtcacacaatttcacaatttcagagttgacaaattttcacaaaatttcacaaaatttcacacaatttcacagagtttacaaacttttagaatttacaaaagttcagaatttccggaagattcccaaaatttttaaaattccaaaattttgacaaaagttctgaaattataaaattccaaaatttttaaaattctgaaaaaatttaaaattccaaaatattgacaaaagttctgaaattataaaattccaaaatattgacaaaaattctgaaaatattgaaaaaaattccaaaatttttaaaattctgaaaatattgttaaaaattctgaaaaaagttctgaaattataaaattctgaaaagattttaaaaattaaaattttgagagttttggcggattagcgcaatttgagtgagatttaacagatgttaaaactacgttaaaaattgaaagcgttggtttgagactgcgtttaacacttgaatactcttggtatcataacaaatctttagccatgaaaaaatcggattttcccaaaactatttgatttatcataaactaacttgatttaccataaactaatttgatttatcataaactaatttgatttatgttaaattagttggaactgctgatacgctaatgggatctatgtcatgggtttgagaatttgatggttgacggggtaaattaatgtaaattatgagaggttggaatccgcctagcactttatggatttggtttatattgactgtggaatcctaagggggtggttgccacacttacagctcactccgtctaaccacttttttccacaatatttaccctaatttcttgtaaaatacgtttaatatattttttagaatattttcataaatttgtggatttttttccgacacccagctcatacacatttttacactaatctaccatgtgaattttacatgttatactcacttgtaaaatattatccctattgttttatccctattggtattatgcgtaatggtatcttgggtttggtattttgggtgttggaggttcggttaatttactgtcgtgacacacacttacacaagatttgtgttcatctttttcatcaagattcctcactcaatcaactcctatgccaagtaatacttacacagttctcaccaccactcacactagtctacatactacccctttttactactataatactatactatatacccctagagggagctatcttaactatatacctagaattatataccccaagagggagctaatttaactatatacctagaattatacccgagagggagctatctaaatatatacccctagagggagctatcttactatagttaactttatacccctagagagagctatcttaactatatacctagaattatataccccaagagagagctatctaattatatacccctagagggagctaattaatttcatacccctagagggagctactttactttatacccttagttactatacatattactatattactattaaaacttgataatactaagttatgttgataggagataggattgagtccttgtgtgtctgctgaggtgtgtaggatcaatcctaggatcatcttggacgcctatgataaggaaaaatgcctcctcactctcttctcgttcttctccacttttacatgtaattctttagttaagtttggatactgtgaataggtaatgataataaggtgaaggagtatatatataataccgagaatggcactaccgtatacgtcgataaagaaatcactaatcttctctggaaatgtaatctcacactatactcaacagtgtaacaatgatttagcctgttcgaggcgatcacggttaagattatcatacctatttcaagacgggcctaaacagtagtttactgagtttacacttgtgtaatagattttgcaagagtttaacacttgggaatagcaaagtcaaaatcagacaagccattaacctaccaggactctccaaaatactaccaatcaatctagaacgtaccactcagttatctcttacactaattaactcttacactaattaacatttacagtagtataattaacattagttatcttttacagtagtataattaagttaacatttacagtagtataattaacattagttatcttttacagtagtataattaacattagttatcttttacagtagtatagttaccatttacagtagtataattaacagttacagtagtataattaacagtggtataattaacagtggtataattaacagtagtataattaggagtgttaaaattagtgtagagctggctgagatcaattggttaatgggaagtccagtaccttttacacatcatattcacactgacagtagtattataatttgtagataagttgggatttgctaagggttaaaatttcaggttccgtaactcattaaaaaatcgtttaggagtgttgataattttgttcataatatttttatccgtgtcaacccttttcatacgtcaaggtatggtaaaaaagttgataaaaataattttaggaaggagtaaaaataaattaacagaacctgacgtaatattttaaaactttgttattccgatttaggaaacagaagttgaaaatctcatcgaacttaacattaattctcattaccaatgactgttatactatatttaatatgtgtttactactttaacatttactatggggagtggaatcaccgattttcttttataatttttaaataatttactaaaaaattaagtaaataatttatgatgaagattcccgagagtaattttgagctagtgaaaatatttttagatgacttgagcagtgagacgaagtgggccgacattgaagccgacgacgactacgataatgagaatttaaacgtccaacacctcaaagaatttgaaatcgccacagactcacaaggcattaaatcactcgtctcctactcacgaaacagccgcggacactccgttaaagtattttcacacttttttacttaattttacccttattttagcctcaaattacctctaattttccttattttaagcatattttagccttaattacctctaattttccttattttaagcatattttagccttaattacctctaattttccttattttaagcatattttagagttattttaggcttattttacccctaaatagtcttattttgaccttattttggccttaattatctttattttacccatattttacccctattttaccctaattttagtccatttttacctatttttacagttagcttagtatattaattatgtattacaatatactgaggtattaatgtgttatagataacgaagcgtgtgaaggagataagggtgagtaagaggattcacaaatcggtgtttgagcggaagaatttagtgccgtttaacctgactgacgagaacgacaccggctccagcttcgtctccaacgaagaaatcatcatcgaactctcacgcaatgaacgcagactcaatcaagacgatgactcagatcttatctactcagtaactcaacatactttttaccactttttaccactttttaccactttttaccactttttatactttttacactatttatactatttaccactttttacactattttacactattttacactattttacactattttacaccattttacactattttacactattttacaattatttatactatgaacaatgtgttagcctgtggacgcgaattttttgaagttgtcgagggacttgaagttaaagtttaagagcctgaaagaggaggataacgtggtaacaatagtgtaaattaattaattttagcctgaggaagttgaagaggaagcacccgccaaatacgtccctccatcacgcaaagaaggaggagaacgaagatctttcgtattctctacactatctacactatctacactattttacattatttaccattatttacactattatacattatttactcagttactaatctacagttacttaactgtacataaaaatggagataatgttgtgattaggatgacaacacgatacgtataacgaatttgagtgaggacataagagagaaggatttaacggagctattcggcagagtcggacgcattcacagagcctatctcgccaaatacaagttacatctcactactttactgttaccacactacttaactatattacccaactattaccatattactattactataactaaattacttgaatatataattaataatttgactatattgaatgtagggagacacagaacccgaagggttttgcgtttgtgacgtatgtgaataaggaggatgcgagggaagcgattaacaagtttaaccgctggggatacaacaaccttttactcaacgtaatataattattatttatttttctacaggttgagtgggctagaccgtccaaagacaagtgataatattatatatcgtacgtggtatgagattagcttacacgcaccttctcagccaagtgcgccggtaatatattatacacaactacaacattattaagcgtaattaagcataaatagggagtaattaagggtaaatttaagctaaaaatagacataaacagtactattttaaggctaaaataaggctaattaaggggtaaaatgagggtaaatttaagccaaatttaggataaaaatggctattttaagcctaaaatagctctaaactagggtaaaaataactaaaaacaagcctaaataagcttaaaataaggcctaaataaagctaaataaggttaaaataagcttaaaataactctaaaactaagtaaaataagcttaaaataactctaaaactaagtaaaataagcttaaaataactctaaaactaagtaaaataagcttaaaataactctaaaactgagtaaaatagggtaaaaataaccaaaattaagcccaaaataaagctaaattagggccaaaaatagccattttaggccttaaataggcgtaaaataacagttaaaaatgaccaaaatgactaaaatagccttaaaatagccttaaaataggcctaaataactctaaaataacgcctaaataactccaaaataggggtaaaatacgtttgggaatgtactgttgtgcgatgaggtggaaaagtgttttgtagcataaaatccccggcctcgtctggacgaacactgacactagtggcaccagtccgatgagatccaaagctgttttactaaaattactattcaattttaaaagtaaacaaaaggctgagagttttaaagtatttcccaaatctatcggcaaatactttttcatcaaattacccacacgctcactcaacacattcgaactcctcggataatccttacatatcctcacataaactcttttatccacgtactcatcctttataccctttgtaccccctctatcctctgtaccccctgtaccctctgtaccatttgtactatcagttggcccaagtttggtattgtaaacttcggcgtgtttgatgaatgagttgatattatctgcgcaatttccgtgtgtaacagtgcccgcagtgagtaaattgttgtacctgactacggctgtgaggtaatcgccgattcggttcgggtttggcgttgaggatttaaaggccggcgctggtaaatccagcaagagctcaagctccaacgccctggaacctatcctacaactacgcaaacaactcattacactgtccgcatcacttaatctcacacatttactcaagataatggagttatgttctgagtcaggtgtgttacgcagtggtaggtagagactctgcagttctacggggattccagtcttgctggagattagttttttaacgttgaggaaagtgtcgttgaggcttacggtgactggaatctcagaattaaactgagattccttgccccaaaaagttttaatcttcaactccacacggtttaaacttgttatcccactcaaggatttttcattaatcattagatatttcggagaatctcgcctgaaatgtaatttattattactgcgatgggttgatatggacgacacattaaacattaatacataataaaaaattaataaactattaaaatttatcaatattttgtacatattttaatattttaatctttttttcacactcagatggggaaatcacataattcatcaaatttttgtaaataattattaattttgtaaaatattaaaaattctgtaaaatattaaaaattctgtaaataattgtaaaatattaagaattgtgtaaataattgtaaaatattgtgatgtcggagagatcgattgagtttgatgggttgtgtagtgacttgggtttattaattcctgattctagcactgttgtacacaaatccgaatgcctttacaggtaaacaactgattttccctaaatttcaactataaatttgtgaaataaataatttagtattgacactgagtattccttgggaggaatttacgtgaatttgttaacgtatcaatcttttggtaaagacttgctcaaattcgatcccatttaccccaacgccatctacctcaacattgtcaaacgccttatcccatgccaacaagaacccgaccttaacgaattcaacactaccgaccagtcagaattggtgtaagtaaatgaaattcacaaatgtgttagcgtaagtgagaagaaagtgtttgaggaaagtgttgagtataatgttttttcacctcagctgggctcaattcccctagatcacactttcggacaacttctcaacgtatttcaacttagttactgtaatctcattgctaattttggtgattagctgtgtaattcgataattggacacgccggatacgaatttaaaaataaccaactcacattctccaacatactcaacgtacactttactcagttttatcttcaatttacacagttttaccccttatttaccccttatttagctctaatttggctttattttggtcttattttacacttatattacctttattttggccttattttggactattttaggcttattttacctttattttggtcttattttacctttattttggcctattttagccttattttaccttaattattcttattttacccataaattagccttattttacctttattttacctttattttggtcttattttacctttattttggcctattttaggcttaaaatagtcatttttacccctaaattagctttattttacccttaattatctctaattttacccttaattttaccccaattatgttaattttacagcttatttacttatgagttacttgataatttggaactgagtaattttggtaggagtcgaagtatgcgcgggatttgtatcaggttgagaatccgaagcggattgactatgacaatttatcctgtgaaaaatgcaatgccactactaacctctggctcaatctttccgatgggtatcacaatacccatcccacaaactatttaaccactcaatcaccaaataacccctctaattaccttaaattaccttaaattaacataaattatcataaattatcataaattatcataaataaacataaataaacattataaagttaatggtgtagatatgttggttgtggtcggaagaactataacagtggcgggtgtcaggacggcactgagggtgctgcaattctacactaccacgtactcaactgttaaccaaattattcttaggagacgggatctaagtatcatttagccgttaaaatcggtaccgtcacgccaaactcagccgacgtctacagttactcccctgtacctacttacttagtttatttactcattataactgagtataatattgttaggacgaggataatctggtgattgatcctctcctggaggaacatctgaaacacttcggaatcaacatccagtaactcaccacacaataacacaataacacaataacacaattattacataataataataggataataatattgtagtgatttgcgaaggactgagaagacgttgttggagcttgagcttgaggataataaaaactacaactggctctcagacgccagtggagcttcactcatacatctacagcccaagtaactgataactcagccgtataaatttattaggttgattgggatactgaacctgggtaacaactgttacctcaacagtgtgttacaaatgctaaacaacgttaaggaactaaacgactttttccttcaatactatcaaaccaacctgcaaaatgtatttttcgggtagttaagttatttttagaaatttgagaatgtgaatttgttcctcctgcaatacgctaaaatctgtacatgcattaacaccgacgttttcatacacaaatgcaaccaaattctcgatcagtacaaaaatttattgagtgaatctcacgaaactgatgacagtttgacccaagtgctaagtaagattaaaacgtgaaactcatttttagcgcatgactgcttttacattaacccaaacctcttcaaattcactctaggtatttttacctaggtttcagtatttttacccagttttcagtactttacatagttatagttaccgtttactcagttatagttactgtttacatagttatagttactgtttactcagttatagttactgtttacatagttatagttactgtttacatagttatagttactgtttactcagttatagttactgtttacatagttatagttactgtttacatagttatagttactgtttactcagttatagttactgtttacatagttatagttactgtttactcagttatagttaccctgtgggtactagatattgtataaacaggtaaactgaattgccataggactgaacaacagtgtgtttaataacaatgagcagcaggatgctgaggagtttttgagctttttcattaattaccttttcgacaacattaaagatcttaaatcacttttccagctccaagtaactgacaacttagttcacattgttcagatgaaccaaataataatttgtgaagagctgaagttagttaatgtaaatcacgtggagacgcatattttaccctttgaactcatggacattattaactcaaaaattaactccctgaattctaattccaccgacatagatgacataaatgatataaatgacatagaaattgatatcaccgttagtcaatagttaactcagttgatcagctaatgtgtttaggactgtgtgttgggttggtatggtagtgtgttggtggattatataagtagtggcaaggtgtacaaggcgaacttgtataataacttgacaaacgcgccaagttacttatttgtcaagttgaaccgcttctacatggacaaagtgcccaaaaagttactcaacaaagtgacgataaccggggagaaattagaactaaacctgaatcacctgaacttgaaggaattccaagactacacacagccacctctcgaacgcaattcaggattttatgaagtcgacgaatcgttcctcaaccaactactactcatgggattcaacgaattcgatatcaggcatctttttacacacttttacacattttacacaattttacacatttttacacatttttacacatttttacacactatttacacaatttacacattttacacaatttacacattttacacaatttacacattttacacaataccactggttactaattaacatgtaataattttatgtaggagatcccactttgtgaataagtctactgatgtcgatgtgtgtgtcaattggatcctcggtaacatgacagaccctgataccattagcagtagcctgagtaaactccgtcaacttggccatacggatgaccatttagtaagtcacaatttgtaaataaagtttagaacatgaaattacttggattctacggtaactcggataaagttgtgagttactatgaacagcttaaaactgagcagctaagtgataatgtgagggagactgtagtgtatgatctgattgggtttataacgcatatcgggagtaatgtgaattcagggcattatatatgtcacttgaagaaggataacgagtggtacgcattcaatgacaccagaattaccaagtccactaatccacccattcaccacggatacatttatctctttcagaagtcttaatataatattatactatatataatatatactatagtatatatataggagtatagtatatattgtgtatgtagtatattatataagtatatatcatgtatatagtataatatgaataacacttaataaagcacaataaagcttaattaactcttaaattacgtaattaacttgttaaaacacttatttaatactattaagagttaccttactaagaactgttgactattgtctagatgattgatgtgtcccaaataactaaatttactaccaataaggaaatatctccaacacagatttcatatacataattaataatgatgtttgtactgaagttagacataagaacagtggtttggaaacacaagatggagcccaacccttattcatttacttctttaaaacgagaattaccgttttacacaaataactcttttcactaccaacttcaacacctccaattctcttaccactaattcttaatctaatctactatacatatacaatatactatattaatatatagtatagtagtatagtagtaggagtacaatagggtatattacacactttagtatacactaagataacacttatttcagcagtatacaccaattaataccccttaatactgttattgtaagcttaaatatgtgtaatagttgttataccctgtgtaatatacacctgatttactacctaaacccagacacctaataactatactactataatactatactatatataatatactatagtatatattgtatatgtatagtattaagagtatactagagtatattctattacattacttaacacttcataactcttaatactgtttaatactgttgtaaatagtatgttagaaccctgtaaacagtgttataccacgattaagatacgcaatttactacccaaaaacactaaacccagacatctaccaaatactaacatatatataatatatataatatacttagatactatactacatacataatatacttatatactaagaataacaatacaatattaaagtgtaaaattaattattagattgatttgtgtttaacttggactgtagttgatctagtgaattaacaagagattgaccgacgtttacagagttaataagtttatacaatggcattctcagcagatgaggaattctagagcacaattccttcttctcagggagtgcgcttagacatcttagcctattcccgtcaactagcgtatggtcaaaacagccgaaatgaggttcaaaacgccatttaacaattttagaagcgcgtctcataccgttaaccacggacatgaacttggggaaaatagtatcgtcgtatatgaaaaagtacaagttagtcttttctaggctggaactcaagggttcgaactcagttccttccacagctcttaacattattgtgttttttatcagttgcattttgtacggtagtttaccgtccctcggttcaaagtgtttcagtaaattttccttaatgtaagatcttagtctgtgattcaaacgtgttaatctgaactgtaccacgatttttgaatccgcgagatgttgttttagggtttttacaagttggactttacccgggcggaaggagtttttatgcttcggagtacgattcgtcatgatatctctgtaacaaatcgtgttcaccgcagagctgtgaaatgttaaatcccgctgtaaaatgaaacattttgaaaactttaacaaaattaaaaaaattagccatcccaaagaaaatattttacacattaacaaacccgtggaatccacaaaattaacatcttaaacccatttcaaatgattctaacaattatacattcatcaattatatattcataaattatacattcataaattatatattcataaattataatattcatcaattacatgtgaaattaaataattttggattacactataaattccttcacgtttgggtgagattacaaattaaaatgtgtccctgtttaaggttagggccaggaatctcaggcaaatcgaatttacccaatctcagcggggaatcaccaaatgagcccagttacacaattgagcccagttacacaaatgagcccagttacacaaatgagctcagttacacaaatgagcccagttacacaaatgagctcagttactctggaccaggtcgtaggataaagtctttggagtctgaattcttgtcaattttaagctccattgaccttaaaaagacctttaaacttgtcagacaataattttatacaatttgttactagataattctagatttatgagctgagattgcgtgttgttgtagtatttgttgttcgaattcgggcactttggcggtttccaggaccactaggatatcctgctcaaactggaacttaacgtatttctccacagcactgagtaacacctgttccaaatgcctaaggttcagaattttagtattgttgactgagaccaggcgtatgttcttgaaatcatatcctatggtcaggtctgaggctaggatttgacttagtattaccacctcctcaccactctcacgcgcaaacatgtccgacaacggcttcaaaagcgccgtcggcgccctctcatagaatttcttaccaaactcgtcctaacacaatgtcacagtaattattatacagttaactattatacagttgataataattaattatagtggttaatagtggtaaaaatagtgttagagataggggaagaatactttgagatattccatggagagtgggatgaaaacgagtcctgcgtagatgtaatatctgggcatgatatcccactggtgctccggcactaaatagctcggcttcccaagctttatctacaacattcatcaacatcactttacaaatttctaattagggttagtgggttagtgggttaaaatgtgttaaaatgggttagaggttacatggatttttttgagtttgttattgcgtaggatgagtagttcgcagtcgtctccgcagaatttatcagtcagcgaataccccaagtgcactctctcatcccctctacacaatttaaacatatccacagtatatatatattatatatgttattactaagtattcagggtataactaaggtattactgggtattcagggtataactgggtaagagtgggtaagagtgggtaagagtgggtaagagtgggtaagttacctgaagtgtacagtcccgtcatcggcgatgggatgcccgttaatttgcaaaatcacgtcatttgtctctattactcccctcagcgattcgtcatactgacataccattataccaccccctaatcccaactcagtattatctacagtattatctacggtataatagtatagtataatagtatagtataatctatggtataatagtatagtataatctacagtataatagtatagtaatatctacagtataaaggtataaaagagtgactacgttgtttgtgagataggaatgatttgaggaagggattggtgagtagttggtatgtgattccgatgttgacgaatcctgtgtacttgttgaaaagttggatttgttttagaaactggttaataatgcaggttggtatgatgtagccgatgttctgcgcctcatcgtacgcctgaaatgccacaccaatcaccctcccatcctttatcgcaggaccgccagaatttcccgaatttatcgctgcatctatttgcacacacaataatctaacaatgtgtaaattagtagtgtgtaagatgtgtaatactgtaaattagtgtgtaaaaatgtgtaaaaagacacgttagtgtctaaataagacacattagtgtgtaagtgtgtaaaatgtgtaaacgtgtcttatttagtgtgtaagtgtgtaaacgtgtcttatttagtgtgtaaaaagtaacaatgtgtaagaatgtgtagaatagtaagaaatgtgtaagatagtaagaaatgtgtaaaatgtgtaaaatgtgtacaatagtaaaaaatgtgtaaatagtgtaaagatgtgagataccgaaaattggagtgtgagtatgtggtaacatcgactcttgatacgacgcctgaagtgatgcagaggttatcaccgcctgtgggatacccgatgacggtaacgttatcgtgtaaattcggcacgtcaccgaattccagcggtgttatcccgtcccaaaacgattcatcgtccacagtcaacaccgctaaatcacactcatgaccaatctcaatcattctagcaatgtatttcctagtcgatctacaccataccattagcatacattatacacttagtatattattagttaagtgtgtaaacgtgtgagtagtgtgtgttacccgtgttttttgactaggcaccggttttgccaggagacgcagtgtgcgttggtgaggattagtttatccttaatcacaaacgctgaactaagaattattagttggttcgggttacccgatgctcttgatttgcttcctcatctgccacggctgagagtagttcggatccgtagaatcacaatacaactttattatacccgaacaagcatccgtaaaatatgaacccacagaaccattcacatagtttacagagttattcacagagctcacagagcttacagagctcacagagcttacagagttcacagagttcacagagtttacagaggtcacaggagttaccacagtgtcctggtgagggataagttggtgtgtttcttcgggtgtgtttggcaggtagggaaatcctgtggcattttctgatttagtgtgattaaatctcctggcacagggaaggagagggacttttttacagaatttaccaggtgaaaaattgaaaatctgcaaaaatcttgcaaaatttaccttataaaatttggaataatattttacttgtaaaatatttgtttgtgagtattttattaaattttgggaatggttgagattcctacaaaagtaaaacattttggaaaattaaccacaaatttactaaatttactaaatttacaaaatttacaaaatttacaaaatttacaaaatttacaaaatttacaaaatttacaaaatttacaaaatttacaaaatttacaaaatttacaaaatttacaaaatttacaaaatttactaatttacaaaatttactaatttacaaaatttactaatttacatttataatacaaaaattattaagtgtgaaatctggcaagtagtgtgaaggggtaaaggtaaaatttaaaaatagtgtaaaaataagtgtgaagaatcatttaaaagattaaatgactggagttagtaaaaagtgtcggtgtgtggttataagtcagttttcttgtaatgttccatgaacttcccactctcgacgtctgaaacctgtgaaactcattagaatacattggattcctcacagttttagtggaatctccgtagaaacgaccattcacaaacacacgcgggacactcctcgctcctaacaatcaataattattatttaattatttaattatttaattatttaattatttttaattatttttaattatttttaattatttgaatatttttaattattaattttttacctgtgagttggtttaagtaatcttggacctggtccatgttcggattagaatccaactcctccacgtgctaacacattttcacccaaattaaaattaaattaaaattaaattaattatttaaatttgttaaataaaattaattaaaatgagtaaattaaataaaattaagtaaaatgagtaaattaaataaaattaagtaaaatgagtgaatgggttgatagagtgggaagtgtgagggttacgagatcgtgtaggttgagttttttgagtgcgtctttggctctggtacagtaggggcagtacctgagtgtgggtgactgtgtgggaaactaacgacttggagaagacgacgactttgtgttttttgacgaggctgtcgacccagtccttgggcgttttttcggccattttaaacggcagcgtgaaggaatatttactcaggaaatcagagaagaaatgatagtccagacgacactgggaaggctgaaataaactcacaacacaaaccaaagtaaataaaactaaatacttcactgaactcatggatgaaattatcctattgaattgtaaaaagaattcaatcaaacaattaaaagtaaatcaatcacacccaaaatcagatgggggccagtcatatgttctcagtattctttaagttgttcccagtttttcaaaagttttctcagtaaattaatttgttctcagtaatttaatttgttcccagttttttaaattgttcccagtaatttaatttgttttcaataattttatttttttacgtggaatttaattctatcatgtaaaattaatttattatcaaatttttatcaaagatttaaagtaaattgaggctattttagaccaaatttcaattttacacaaaattaaccactctcacatttcgtttaatgtgctctcaaacggatcttcattccatcccattttatcattccatcggatctttattctataggatttttattccataggatttttattttaccggaattttttcttctaattatctcaattttaaaattgtaaaataattttaactttaaaatttcaattatttcaatgaaattcttttaataactaatagttcttttttttaccctttttacgaagttttaccaatttacgaaattttaccctttttacgaaattttaccaatttacgaagttttaccctttttacgaagttttaccaatttctggatctttaccaaaatttcctaaatttcctaaatttcctaaatttcctaaatttcctaattttcctaattttcctaaatttcctaaatttccaaaatttaccaatttatgtaaatttgtgagatatgttaactttaaaatttttctctaatttttccctcaatgacttcacttctttataacttcacttccaaattgtaacttctcattgtaacattaacaaattataacttcatttttttgtaacgtttcattgtaacattaacaaattataacattccattgtaaaattttattgtaaaattatttagtgttgagtttgttcgggatgaaagttgtgaatatttcgagtcatgggtgacggcacgaacccttttcgtaagactgagttctactctgactggtctggatactcacagccgcagtcagatcccaactatcgccctgaatcctactccaaccccgaacacatcaaattcgtaccctatgacaattatactcacactcactccaacccacactttcacaattctcaatccaactcacactatcccaattctggcacatttagtcagacaaactctcaagggtatagtcagagttctaatgggtataatcagggttctaatgcgtatggtcagagttctaatgggtatggacagggttcacagtatgtaccaaattcacacaattactctaaacccagcactcactacgtatcctcacactgtataccgtcacacactgtaacctctaataatataagctccaatagtatacaatcacatggtgtgagctctagtaacaatagtgtacagttgaataatatgaagaatgtccagtatggtcaggttggtcatgtggtgggttctgtggatggtgtgagtttaccttaccaaggtcaagtgcttgatggtacaaattcgtttaatcgtcaaaacagtgaacccatccccgtacaatatcaagataatgtaagatattcgttccccaagggtaattcagggtctacagtggctcctggtaactcagggtctacagtggctcctggtaactcagtaaacggcccgtattaccagaggaatatcccgggatataagaacgaacctgacgtgtattacccaaattatatgtactataacggacaaatggccagtaggcccagtacagactccagagaacttaacagagatttaactagagatttgtccagagatttgtccagggatttaccgagagaattaaccagagaactgaacagggatatccctagagatttgcccagagatatccctagggacttaactagacccgagatacctcgtgacttaccgaggagcgagttatatttttcgaggaattatgagaatttggcgaacaagaacttttttaacgcgtcactgtcgtttaaggaggcggcgactgcgatgttgtcaatggacgccaagaagtcacactcacgtcagaggacaccgtcacgaggtagacccacagccagaggcttagggaaactacagaaaccagaaaatactcaaaccacctcaagacctgagcaatctatctcaagagctgagcaatctggtccaagggatcccaactcgtaccagagatttccaaataccaaacccatttaccaccaaaattataacaataccgatccatacacactttataaagataccaatagggttggagatgtcaacagagatactaacagggttggagatgtcactaggggagatgtgactggtaggtcagatcccagagtagatcccagtagattggcagatcccaggatcgtacctatgaaccgtacagatattactagaggtgacgttcccgtagttggtagaggtgacgttcccgtagttggtagagaagtaccaggggttgttagagaagtaccgggagttgttagagtagataaggacccggtgtataattattacatgataaatagtaagattaatagccctgaatatgccaagtacaggaaccgcgggttacagcagttgtcccagtataacttaatgtcacagtacagtcagcaacatggaattggcaactacatgtccaacctcaacaacttcaatcacattcccaatgttcacaatgttcacaatcctcacaccgttaatctccacggtgtcaatcatcacggagttcctggagttaatcaccctggagtacatggaataaatcatggagttcctggagttaatcatggagttagcaattttacgggtgtgagaggatttaagaaggttccagtgtcgggacagagatttgtgccggttcctaaatctgtcccggtgaggacagagaaacaccacgtgatcgaggaaatccaagcggacaacgaccacatgaataatctcaaaaccaacgccatctcatccgcatcctcaatcatggaatcattccaacactcactatccaataaacgcaaacggtacactacccccttatactcttatatacctttatatagttaatttactcttatatactcttatatagttaatacccttttatatagttaattcccttttatatactcttatatagttaattatactctattatatactcttatatagttaatttactcttttatacttttatatagttaatttactcttatatacctttatatagttaattatactctattatatagttaattatactctattatatagttaattctcttatatacttttatatagttaattatactctattatatagttaatttactcttatatacttttatatactctattatatacccttatatagttaatatagttaagtagttaatactgtagtagttaatacagttaatttagctccctctcggggtatatagttaattatactctattatatggttaatatgtttaataatgtgattagtgtgaagaactgtttggttgaggactgtaggaatgtgattggtgagcagccgaagatagatgtgcagtattcgagtgttgaggtggacggtcgcaggaagtaccttttatccgaaattctgtcatcgcttttaccctatcacacgttctaccatgaacagctggacccgcccagatccaccaaattcgactactccgaaatcagaaaccaaatccaacaagtacaaacactactcgacaacatcaacaacaacgaacacatcttcaatcaatccgtacacattctctacactttctacacatttttacttagtttacactgtctacacatttttacttagtttacactgtctacacatatttacttagtttacacagtttaaaagaggtttgagagctgtgtaggtattttcgtgtgtgaaggagtcgttggtggcgtgtaacgaatttgcacttgggccgaggaacgtggaatccaatacatctccataacacccacaccacaacacaaattaatctaccacatatatttttctaattcatataattttctaatccattttaaagttgtaaatttatattaagttgtaaatttatattacggtgtaaatttatattttcggtgtaaatgtatgttttacggcgtttgggtgttttgagtggtaaaaatttgtgtttggggttccagcgtagaggcgttaaatcctttagggacgttgaatttatctccaaagtgacagacgaatatcaaaaaatatttgaggacccaagcccaaatactaaaagagaaagagatgaaagaaggaaacaagccttcaaatacgtctactataatccaacattcctacaaagattactaatgtaacaattctctcatttaacaattctcccatttaacaaataattaaattaattaaattatttaaattatttaaattattaattaattaaattaattaaattattaatttgagtaaaattgttgatgcgttggtttagattgaaggctcggttttttgcaacggggtggattcaccttttaacggctgtcctgacatactctggagtcaaattcatgttctggctggaaaaatacacaaacaaggatcgatactacatatgatacagtttattaatattctaaaaattgtaaattaataaaaatgccgtgaaataaattttttaaaaattttaattttattcatatttttcccttttaccaccttatttaccctttttacatgcttatttaccctttttacatggttatttactatttgcttgttattgtttattctggaggatgtgtagacgtgggcactattttactaatgtttcacaatttattaattttattttaattttattttaattttattttaatttacaatttttgaaagtttgaaaagatttatatttatcaaaattaatgatgattggacggaacgttcgattcttctctgtgatgggcagagacactgcggatttaagttctaaaatacttaaaagaatcacgccaaagtttacgcagaaaccgctgggaagttacccgttcccacctgagcacgaaatggtctggaaaaacagaagaactgtcctcggcggctactttcaacagtcaatctcgccattccaactcaaattcgtttatcccgtcattcaccaagctcccgccaggtatttttactcccaatttaacccttaactatactattttaactcctaatttaacccttaacaatagtattttaactccttaattagtcttaatttactcatattttaggcttatttaggcttattttagtgttattttaggcttattttagtgttattttaggcttattttagtgttattttaggcttattttagtgttatttaggcttaatttagtgttattttatccttaattattcttaatttaccccttaattagtcttaatttacccctagattagacttaatttaccccttaatttggctatatttacccttaacaatagtattagcaatacgcttgagtaaatagttgtgataaattgtgtttagaatgtgggctaagttatctcaggcgttttggtgggtgatttggccgactttgatggcctacgtaggctttttaacaatcaaaaaattagataaaaaatacatcaaacgacacaactacttctaactctctcataatttcatcaattttaccaacttattcacgtattataaactgtaaattatgttaaatgtgctctgcatgtaaactgggttatatattgtgaaatgtgatgtacgttgaaaaattgaagtaatttttaggtgttgattattggcttccggcgctttcgtagtctttttcaagtgctgcgacgtcttccctggcttcctggaactcgcactcctccatgccttcgctgacgtaccagtggatgaacgcacgtttggcgtacataagatcgaatttcttgtccattctggtgaaaacttcggcaattgaagtggagttactgatcatgcaaaccgccctcgagggcctggaaatgtcatcacccggcaccacacacggaggctggtagttaattccaaacttaaacccagttggagaccagtcaacaaacttcacagtcttcttattcttcaccaccgatatcgcatgattcacatccttaggcacaacatcgcccctacacatacatttacacaccattttcagtataggtaatataggtaatatacttaatatacttaatatacttaatatacttaatatacttaatatacttaatatacttaatatacttaatatacttagtataatagtataatagtatagtggataactaattggatattgtggtggatagggatgtgatacctgtacatgaggcagcatgacatgtagtatcctgttctgggatcgcattcagccatcatggacttggggtcgaatgctgagaatgtgatttcggagacggacatttgttcatgtttggctttcctcttactgatgatgggtgagtatgaggagagcatgaagtggattctcgggtagggtacaaggttagtttggaattcgctcatgtcaacgttgagtgcaccgtcgaacctcagtgaggttgtgagtgaggaaatcacctgcgcaatgatcttgttcaggttctggtagttggggcggccaatttcaaggttattcttgcaaatgccgtagatggcctcgttatcgagcacaactgcgacatcagagtgttccagcagcgagtgagtggtcagaactgagttgtaaggctctacaactgcagtggagacctgaggtgacggccagatgcagaacgacagcttagtcttcctctcaaactccgcgccaatgttctccaacagtaaacttccagtaccggaaccagtacctccgccgacagcggagaagaataaaaagccctgaacactgtcacacatgtcagtgagtctcctaatcctgtccatgaccggtgagtaaatgtcacggcccacagtgtagtgtccccttgcaaagttattcgccgcgtcctccttgccagatatcaactgctcaggatgatacaaacttccaaacttgcccttctccacagagtcaatcacactaggctccaagtccacaaacacacacctcggcacctatcaacatcattaacactttttcacacattaacactattaggagtataattaaaagttaacatagtgttattagggctaatctagagctaaaatagatatagttaaggttaaattagggctaaaatagctatagttaaggttaaattagggtaaaataaggataatctagagctaaaatagctatagttaaggttaaattagggtaaaataaggatagtctaggggtaaatagggtatagttatgggttaataaggggtatggagttgtgttacttgtctgccggattcggattctgagaagaatgtgtggaaggcggctccttcttcatctttcttggacttgctaactttctcagtggtaccgtcaggcttcactccgtgctcagcacaaaataactccctacaaatatcatcacaatttccaacattacataacattcactatataacattcagtatataattttttactatataatttttaccatacaatttttaccacgtaattttttactatgtaatttttactattatatattagtgtgttaatattgttggtatttggagtatatagatgtataggtgtgggattgtgtagatgtgtaagttattaccagacggagcttccgagttgtacaccggcttgtcctacgtgaattgcaataacttctctcattttttggtttgagtttgaaattatttttctggttgattatgtttttggaatctttggttttgttaaaactgaagatgaaaatcaatactaaatgaacgtttgatttgtgaatctatgtaatattttactaaaataatttttaaatacttaaaaaataatttaaagcaagtaattttcagacctgcgtctcctaagacgcaacctagatctcacggagaccgtaccctcgaaaatccacacacatcttttaattcaaatctctaaattgaaaattcacattaaaaaatcactcactcgccgcggcgtctctcgtatctttttccacaccaaatctgaaacctacacattttcccctatcaactgtacataccgttgctaaccttaatcaaacaactcacaaatacaaattaatatataaaattttaacacaattacatgatcacttggtgataaattgtataattagccgttaatgtatgaaatttagatatttatagagagatttacgtgtacttttcatatatacagcgaaattttacactaatagataaaattttgtaaacactatcttaagatcacgaagtgacaattgtatgagagcccaaatcctcaattagaaaatcttgataaaaattctcaagataatgtgataaaaattctgacggcaatttgataaaaattctgacggcaatttgataaaaattctgacggcaatttgataaaaattctgacggcaatttgataaaaattctgacggcaatttgataaaatttgatgacaaaaatttaagagttaatttgttaaaatttgtgatttaagtggtctgatgtcgaattttaaacttgcgtaaccagtcacaaatcactggattcaagtccaaaacagattaaaaatgcgtaaataattccatctaaactatgaatcgttggactaaaagtgagtaaaaaattttcgagaaaaataacatcccaaaagtataaatttatgaatatttaccaaaatttatgctaactaatttataaaatctaagaataataatgaataaaaatggtaaactgagtaaaaaattgtgattaagagtaaaaaattgtgattaagagtaaaaaattgtgattggggatgaataatgtgaaaatggaataatggaagaaatgttaggcaggtgaaatgttgagtgaaataaaacttttctggcctaaagttggtaataactaattgaaaaataataggaaaattagaggtgtttgggggttagaagaaaaaagattatttgtactatttcctgtccatgcatttttgcacgatatgtaggcattcccgccctgggacccaattaacccgaagaagttaactcacaaagttatttttggctacggttctctcttgtttttttctatttttttactgttcaaagctacgcaaagtcgcccattttaacatcagtttcatgattggggcagtctctctcacgggatagcatcttttaccagttcccgactttgttttttattcctcaaagctttgaattaatcgccggcatactatttcactaattttaagtttggctggattattcccgacgatttcgggagtatggtgatttagttacagcgccgtatctgaaccagggaagaattctatacctttctcacactctaatcggatttctcaattttttacactcataacaaggtatctaaccctttccccagccagttttttccatctatacatttcggttctacctttttttattttgccaatcttttcctaatttgatttctaaatttattatttttttctaaatttgatttattaaattgatttcgtaaattgatttattaaattgatttcgtaaattgatttcttagtttgagtttattttcgtggatttgattttatcttgattgattatttgttctaattttagttcattttctaattttagtcgattttaacaattgtttgatttattttaattggatatttttaaatctttgggttacttttcctccccaaccgtgttttatttacactgcagtcttttaaacaatttttcattttttcaatacatactaccgctctaaatctttcagtagcaagtcactcctaaatctctcaaattctcgattttttcccataatttattttttccatacaaaatttgacaataaaattgaccaattcgacaataaaattgacaataaaattggttaatttgataataaaattgccaatacaattgactaatttgccaataaaattgattatttgatgatgaaattttatgttgtgtttgaagatgagtttggatttagttttttgataggataagcccgaatctcaagtgagaatgtctagttataaggagcagattttacgtagtcccggccctttcgactactgcaaatgcagatgcaatgtgccctattacatcccttacaattgctttctagatcaatcacattcacatacacattcacattctcacactcaatctcattcacattctcacactcaatctcattcccattctcatggtcacacacaatctgatacaagtgatgaattgataaataagtttaaaaatctaaaaactcgtaacgacacgagaaatgaactgagaagtgaacttagaagtgaacttagaaatgatgtgagaaatgaactgagaaatgatgtgaaaagtgatgtgagaaatgaaacgcgtaatgaattgggagatgtgtttgaggattctccgttattgagtgatgagacggatttgacgtattgtaatttggacaatggtctggagtgtacggattttctggagggaatccattgcattaactgcgataaaccctttttaatgtacacaaacctcgattttaaactctttgataactggattaactacgtcttttttcacaactccatcaaccaactctctctcaacacccccaatgatcccgattcccgacatctaaatgacacagattacaaattgaatgacacggattacaaattgaatgaagcggattacaaattgaatgaagtgtcccacctgaataatggaggatatgacagattaaacggtgacacgtgttataataagttgagtgatacggtggagtatgagttagtggacgacataataagtatcggtgacataatgagttcgatattaatgtcaagtgaggagacaatgttcggtataataaataacatatcccctggggaacattgcacaaatgagaagaatcagttatttgacagcgtaaagcggtttttacagtactgtctcggtgaagacactatagttcacttaacaggttccacggcctacgatattgatattgactactctgaaggtacgtcagccgctgcttattcagatcttgacattgtgttactgagtaactcatttggcggagatccgaggataatattacagaaagtgtacagcgagttaacgaacatgcaacatgtgttaaaagagagaaataagtgcccaatttgggtcctggcagactctaacataaagcttgtagaatcagccaaggtgccaataataataatcgagactaaaaacggattactgtgcgacatctcagttaacactttgtatcccctgttacacactgagctgtttaagagttacatcgacgaacatcccatggtgaggcccctgatgaggattattaagcattggttaattgtacgtggaattccaaacatgaaggagggtgggttcccgtccattctctggatgtcactcttcagcaactcactcgacgccactactcttaataccgccaccagtaatttagaatactcctatccattcattcatagtacagacgctatttctaccgagttattaggtgacacggtgaattctggtgacggtgccaacttgggcaattcagttactgccgacttagtgaatgatgtgaatggcacaacggcattgacaaatacgacttcactagttgaaacaccatccacacactcgcccaattcctcaaccacattctcacacacaaacactgcagactctaacccagccgaaccaaacaacgctgtagactcaaataaccattttcacacagccaactcagatacacatactttagataatactgccactgttaacactgttgacactgttaacacagttgacagtggtgccacagttgccagtgctataacggatgtggaccacaatacaacggcgtatgatgaggagagtaataacgagaatgagagtatgtatgagggttcggagggctctgaggtgtacgaggagttcaattttaacgagacgtacagagaaatgtacatgtcagagtataacagaggctgttcaataggccagttgtgggaccgtttacagggcggaagaggcgagtacggaatcctatgctcgttggaaaagtgtttctacaatttgtcaaagggcctaagtctgatggacatagtgaacagatttacacatattaaaaacggcagtgactacggcggcatgtcaactttctgtaaaaatgtcataaggctcattgaaatggagcctaacgtaccctacggcacgtggttagtttacttttatgaacttaacagagctaaagaatatatgaacttatacgccaaacgtcttgaaattttggttactctgctctctttcctcagattactcacgaatcccatgacacacagtgacccagagggtcacaccattgatcgtagtggtaacaccgttagcaataatagctcagctgattgtaacagtgtgagtatgtcggatttggaggatttggcgtcgaatatttgtcattcgtttggctatgatttatcgtatttatgggactccacgagacaggatccacacgctaaagaagaatttaaccccttgtatctgaataataaatacgcctttggctactcactgtcaaatgacaatcttaacattgagactatttccacagatatctccactgacaccgtagcatccgaacataccgccaaacctaatctcaccagtaaacagaatctcaaacatccagataacgataaactagctgataaactgaatactgttgacaaactgaatactacgtgtgataatatggataaatgtggtatgtcggtgatgaggataatagaggactttgtggtgcgagtgtcgagtatgttgcgaatacagttgaagagtgcggatttgatacgtaatataaagttgttaacgtatcacatgttccagcagtttaagataattccaaacgagatatttgaaaaggcacatgacaatttgtatacaattcccgtgtcaatagacccgccaacgccgatagaagatgatgtgacggattactttggagctcaaaaggggagtggatttgaaagttgcctatggaacgacagtggctggtacatagtcgtgttacaggacagcttgtgcatagtgaaggtgattaaaatctgcatagagtgggacttctggtggtctaaggagtttgtgagtcgaagagactcacgctcaattttccacggatttgtgtaccgacagctgagattagatgacatgaaaaagtcacagccgcagttacaatcactgcactcagcttcacgtgctcagtttaacagtaacagtgtgaactccccgtcaatcctgattaagcgtgggactctggtgctctttaacccctgtgacattgtgagcaagttacacgtgctcaaagtcgttaaacatgaacagtacatcagtccctcactgtatagtactgacttttacactggcgtaaagtgcatttacgtgttacccgggttcgaggttgaccgtttcatgtgttttgaccaaatcgcacataaactgaaacactacgtcgaattcagaccgcaagtcagcttctgcaagctctgcggaattgtaaacatgaagaaaattaacccgtacacagagtacaaaatacctcagaggaagctcagaaatgccaagtacgtactctgcaaccaaaaatacaaccacatctacaacctcatgcaattcagccatagcctcaaataatcttatcaacaatatatttatactatatttatgtgtatttctatagtatttacagtgtatttatgtgtatttctatagtatttacagtgtatttttatagtatttacagtgtatttttgtagtatttacagtgtattcatgagtatttacagtgtattcctgagtgattccagggtatataagtactacgtatagttattgaatatgtaaaatgtgtagtaaatttagagaattcgtttattggaaacgcttttctttacgtaccaaatgctaacgagtgagcaaaggagaataacagtgaattgaagtagcgcgtagagaagtaatctgccttgggcctttttagtcgcgttcatttgcctgttattgtgagtccaaaagtatctaaactgggagtaaatgttatcaatgtgttcctcaagcttcttaaccctgttaaaggtgttctccacatgctcagtcttcaaaatcgagtgatcgtcagtgccagtggcaaaggtcactgacaccggagtcatccagtgcgtgtttgtcagagatatttcataatccccgaccatgttcgcgtcaaccgaaaacaaaccctcaggcgagtcattcgtatacaatacttggtctgaccaattattaaacaaattaaattgttacataaattaaataaattgttagttaagttgtaaaatgattaaatttattattaaatttgattagttaagttgtaaaaattagtaaatatgattaaaaattagtaaatatcattgaaaaaaaagtaggagaaaacgtactgacgggggatttaacgacgacttgaacgcttagataatcatctttggaggtagtgaagaacatgcccttgatggttgtgggctgtttgaaaacagtttcgtaaaaggtttcactggatttgggcgggacaataactgaaagaagcgatttcgggtggaagtcggtcattttctcgttccactcgttatagtacggaatatcgtcgtggaagtcctcatctcgctccagagaatctggcggagtcatgtcctaaaaaattatcaattcaaattactaattcaaattattaatttagttaacaattttaatatttaattttcagagtaaaggtacaaaatcctgttcataatcctcttcataattgcaagaggtgaacttaacaccgaatgagacgattttatggaaaaaacaccaacttgctagaaatattaaaatactttttaaacggatcattttaaatatataaaatgtattttataaaaattaaaacatttaaaatattccacactaccacgttggaactcctcataatatcttacatcctacgattaaatctcaatttcccgaaattttattcatctcccgagtattcaaactcgtttcttcagtgtttaaatctgtttgctgagtgttcaaactcatttcttcagtgttcaaattaacatcttgggtgtttaaatctgtattttgtgtatctaaattcacttcttgagtgttgaaattagtgtcctgagtgtttaaatctgtttgttgtgtatttaagtcagtttgttgagtgtctaaactcacctcttgggtgttaaagctagtttgctgagtgttaaaactatccccggtgttgaaattagtgttctgagtattaaaactactcccctcagtattaatactcactccgttaacatttacattattgaccatattcactccgttgacatttacattattgaccatattcactccgttgacatttacattattgaccatattcactccgttgacatttacattattaggcatattcactccgttaacgtttacattgttgatattttgagtattgagtgagttgcggtaagagttgatgtgtttagtgtgtatttgttggatgagtttggactgttgtttattttgaatgtgagaggaaattctcgcggtaagatcatccaccagaatctgcgacatgtgtctgagccatgcgttttgtgagtgttcagagttatacaacttgcagttaatctccagcaacagtatatcagtcatgagactggatactgtggtatagtatttatttttaacccttagcttgataagtgagagccaaacgggtttctggataactttataataatttggcgcaatagtctctgaaatcctattcataaacggcttatacctattctccttctctatacttattattatcttattgattatccttatgtctgacgtactcaatactccactatcgtctccgttaacaccggccactccgctgagaatgttagggtcagtggaatatttgagcctgtgaatgtggtcaaaagtgtctgctgtacgttttcgtttagtttctgaaggttccagcgggaattctacgtcagaatcgaaggaggtgttaacagtgtgaaacagagactcggtatccctcatcagcgctattggcttagttaacaaatcatcgtcagaagtgtcaacttcaggctccttgcgcgtttgtcttgaaagcgggtcatgcttaagcttgtctccagagtacagtgggcatttaggatttgatgcgatatggccggactgtccgcagttacggcaaatacgttttccgaagttattgttcacgttactcacgaaaatagtttcatttgggatatgcgtcttcttctctgcgcacttctttctccaccttaggacttttgtcacattttcttggccgtagatgaacactgcacgttcacttccaaacggttctgacggtgttttcctgctctgacgtaaccacattaagcccaaaaccggtatcagattactgtcttcaatcactaaatccagattcttcttcatattaattgactccttcagtaatctcaactcttccttttccttctctatgtcgtccaccttttctacagagtcgttaccaccagagtccattccagacttgttcacgttcatcaaatcgctagagtcaattctatccactttttcctcagtgtaatcatctgcgtagtctacatttgcgtagtccacatttgcgtagtctacatttgcgtagtctgcatttgcgtgtaccagtgctgacttctgcttaagtattatttgccttagctgcgactgatactcgttgggtggaattctaaacttgttagaatcatcaaagttcttaacaactccgaaaccgtcccggtactgtctcaccagtgccacttgatcccagcgtgggagcgttttaatcaccgcttcacttactccgtacattagcaggcgctttgaaagctcgtccattgagagttttctgagatcctcgtagttattcccgattatgctaatgttataaatgttactgcccatgttcgtgttaatgttagtgtaaatctgacgctttagcaagtttattgctaaaccgcagttggacgggtctcctaaaccgtacagtgaaaactggccgttccccttcagtaccatcctcacgtcattcgctatgttccaactactcaacttcaatatcttctctatatacgacaccctcacacttataccactcaaaccattattcatactattgttaacattattcatattattattaacattattcacactattaggattattcacactattaggattaaccttgtcaatattattaagattattaaccttgtcagcattgttagtattatcgataactttaatattagccttgtcaattgtgtcactggttggggatgagagtccgtagagggtgtattggttgagtgggatattgaattgttgcagtttacttgtgacgatattttggtcaatgttgagtgtggatagcctggtgtagtattttttcttgaggcttttgagcttttcaaatgcctgggacatggagctgttgaagtgattctcctgttgttgcaggattgagcaaaccactgaaatcccttcatggctcattagacgtctaattcctctggatttaatcctgaatttctgggccctggtactctccagagagcatacgacttctggcttaattgtcgcctggatcatcttctccagtgcttgaggacgcatactgaaaattgaagtgctttcaacttgtttaagcactcccgtaatctctttctctggaatcactgggtaaaacttcttcctggctactttgcgtagccgtttcatatctgtcatagggttaatcattgctgtcttcagtacccaggcctttaatagtaacttgttatcctccaaataattcttactctttgggttatttattgttatcttaggctcacactggcccactgtgcataacacactattgtccagttctctaatatataacaactcttcgttagaagtttgttcacctgctgactggtttgccgggttatttgtggatctcgttattataaagtcaaacattggcattcccaatcccgttatatcgttattattatacaataccttgttgttaacaggcggcggttggttattttcctgctccacttgcgactcctcagaatcgcctttattctcagcattcaaattctttttcctctccacttctaaaataatttatatactattataatattatattattatattgttatataatattattatattgtgataatactataatactataatactataataatataatactgataatagtaaagtaaaacttggtgattatgactatactataattagtaccgttgatagtgtagaagatgggggctttgaagagtgtgttatccacaattgactgcatttcattagtttttagggtgtgattaactccgaataactcatattcgttagtgtaaactacatttcctagaacgttctccttctggttttggtcactgttatccttattactgctggtattaatatacgtatcaattcttgaggtcattccgatgttatttagtagcagcggatactgttcaacgtattccaggagcacaaccctggtgtcatctgtcaggctcaggtccgttgagtttacaaagtagttgctgcagtggttttgaaggccgtcgaccatgtcatcatccttgtaattcatatttattattgatttcactggtggatgcgcttgccacttcagatgccacttctggtcctcgtggcttttcttcctgttaccgctgattaaactgagcaaggcggttctgaaatccagtttatgaaaccttgcaaagtgtattttagccttatttcccactaacggcaggatgttgaccagatttctagcaactctcgtgtgtattaattcgcgtttgttaaggatttcatcgtcttttccaatttcatgtgggccctgggacaaataatgtgcgtcaaacgagtgatttaaaatatccaagtagtcacagttcttgaaaaatgtgttaacttcacagtactcaaccatggaatcgtatgtcctggaagactcgatattcatgaaagcgttctcaatatactttaaactctttcccatgttaaccaatgctaagcgtgtttccttactcattgtctgtaatctctttctccactgtctcctgacgtcactttcctttccagttaataacaccgagtcgtccttatctcccttgtcattgagtctgtctacaagggaatcactatgttcgtctttatatggcacatttagtaacaaatccaccttactatcggcatcttctgaaacgctcgtatacacaatatttgaagagtttaagtcatagattacgctgttaaccatcgctataacttctggatttttgtaatgtaataacaactttaagtttgttttacttactttatacaactttaacagcagtcctatgttaggatcgtcttcagatttcttgtcggatttggatgattgagcatctgaatcagctgttacacctgtgtaaccataggaattcttcatgcaattttcaaattctaagaaatctgagagtgtgagtttatgtttaagttcatttctgtacttggtccacctgtagttgtagtcgtagagattaaggctttgtcttggcatgttaaactctttcaactcaccaaatagttcagatacttcgtctctcctctccataatgggctcagctgtctcggtcactgacaacgtctccttcgtcagttctcgctctaattcattctctatatcatccaactcattttccaactccaactctaactctaattcatctattatatccaccttctccgatgattctttctggtccacccgtacaggttccagttgttcagctcctaattcttctggctctccattcaaatcatctcctacatcaaactcttctgataaatttaattcatcctgtaaatccaaatcttttacatccaactcatcatttaaatcggaatcatttacatccagttgatcctgtaaatccgaatcttttacatccaaatcatcttttacatccgattcctgtgtgtttaattcttgtgcattcaattcctgtggattcaattcctgtgtattcaattcttgtgtgtttaatttagattgttcttcttgatgtgctgcaggttctgattgatcggcttggttatcatctggttgatcttgttcatcggaggagtcgtcatcgattagccagaagaggtctgaaaaaatgataaaaataaaaagatacttttatttgtattgtttgagatttttgagggatagttcatgagttggtaagggtaaactgtaatcttttggtttgagagtttacgtagtgattttctcagggctttcaactcagtgtcaagctcgtcatctgcgtcaaacaaatccaaatcaacaactacctcgtctgcatcattattgcctaacttctaactacttttatgcttatagtaaattatgctattgtaagattaggtaaaacgggataaatacgttatgtatggaaaatatgttagtggtggtgtgtagtacctgcgagtgtgtaaaatcggttaatcgcccatgccatttccatatctttaatggtcttattcacctttttatcggcttctaatttttcagactctaatttaccatcggttcgctgtgcatcagctagttcttctaggtgggcagggtcagttttaggttgttgtggaatttgtagagaagttcgatgtttgaggttgccagggaatttgaaaagggatttgtttttttcaatcatcttcttccagagtttgacttggcagatttcgcggatttctgctgaggcagtaacacccttgaaagactcatgaacctcggaagttttgcggctcaaagagtgttttatgtgcttcaaatcgcgtttggtaaagtctcgactgtgttccttcccccttgaaaaatccttacctaaaccctcttccgatatagatgggacaaaggggaacatcgggagtatccgatggggctgaatcagcttagaatcagtcaaagattctttcttacttccgtggatcggctgcgggtcgtatctgaacatctccattgtaccatcttctatcgcactgccgacatccgacacattattagatccaccgtcacacactttgcccttgccaacacccgccgaattttttatcttattttgttgaaaagcgccaggcgtatgcatatgtatcccctgaggcgctgaaaaaaacccgttcatcactccaccttgggagccgaacagactaataggcgctgatggacgaagattcacctttttcttggcctcatctgggtcatagctgaagtcttgttctccattattaaatttaggtaagtttgagaggctgaagaagggaagcggagcggtcaccggaactttattatcaggttcgttcatttcttctttatctgctagcggctcgtagtcagaatcactttttggcattctatctaaaaaatgctgcggcagttttgggaaacaggaaaaaacatggtagattaaagctaaaataactaaaagcttgaaaaattaaacgaaattaccgagaattattagtacaaagggtgaataaattttaaaaaaagtatacaatagagctattacattaaaatgttgtgaattggataaaaaatctaacttgtgtaaattatatctcatgacaacaggaccactataaaaaagcactcgacaaatatctagaaaatcaactctaaaaattccagtcctcgaaaacctttaaattgataaaaaatgattcgtaaattttgataaaaatcttttcttgaagtcgatttgactttcgcgaaacacatttggcttattttttaactcgccattttctcatcattaggacactttaatttttcagaggtcccctttgcttttggaatttcctgttatttggaagaaactgacggtttggtaagttttatggaccaactcctggattgtcaattggcaaaatatcaataaatgcgtctaagagaacgtcttccattccggccattttgttaaaccactcctccttttcatggtcgtacctgaagaaaattatggccactaattactttgtttaccctaacaggtgtaatataccatgagccaggatgaaacacagtctcacgttgatgtcagaaatacctttcattcttgcagccacgcctcccctaatcacttgttaaaatcagcccttaactagcttgttttagaaaaattaccttttgcccacgtttaaacttttctcaaacttttcaggtgttttaagccctaatttgttttcggagtcaattacgcctttgatgaatcctaaagaattttttactccttaaaattatcgtttgaaaatgattaaatcaaaatttaagcaaaacaaagtttaacctggacataggaatatttcacctaaatggtagtgttgagacggtttttgaggtgacctgttcttatgaaagtctgacctcaggtacaacaaatcatcccttatggaaattatgtcagtgggcccatcacccccaagttgcttaaaattaattcttttcatgtttttttcgtcttctatgaatatatctagcatgaaatcgtcgactctaaaattacagattaattttgtcttttatagtgtgaatgtgtaaataaacgcttgatttcccaagtcttaactaactcgagctcttgtttgtagcatttcgcagccttgaataacattaaacagtctacgtcaatctctttttgtttatttgttattgttactttgtcttccttaaatactttatttaagtttgcagattcagaaatttgaccgaatttactgtcgtcaaaatttcccaatttcgagaagaatctcgttttactagaaagatattccttattctcgatgttctcggtgtgcaattttctcgaattaagggtaaaactgagccttttactagaaagggaagattccactccgaaactggtggataatgtcttaaaaaacacaaatacacaagaatacacaagttttaaaattattttcataatctacagggaagaatctataaatctacattttatattaataaatagtgcaatgtgtaatagattacacctccaacaataaaatggcgttgggtcgaaaaagttacattcccgaaagcgctaattccgatcttgaaattatgatcaaaatacctgatactactatcgccaaaaaccccaatcctaccacacttgctattaccaaagttactaacctatacaaattattccatcacctttactgcatacatctcactgttagtataacttaatagtatatatataatagtatagtatatgttaaattttatgtgtaaaaaaacttgttgattttatgtgtgttctacatttgaggagtttcttttggtggtaatatctctccagtgactctctaatttggttaaaaatatcaaaaatttacctttgtaacgaaagatgtgcctaaaacggatgaaataattaaataaaatatcttacatttttcaactgcaattgctaatttttcattttgtaatagattttgacacattggataaattgatgacactacttttgtactcaaataaggctcaactcctatcaaaattaattctattagggtttacattgttataataataaggttggtaacataaaaaatttacctttgttccacttaataacaacatcaggatcctgtttagtgtatacgataataattccatcttcacatttctgatgacttaacttccaacggtctaacaactcatctgccaaagtgctcaaatcctctcttggtattcgatttatcaacgccactcctatcctattcatcatttaacatctattgttaataatttgataatataataacattttactactaattatattagtgcgaaatacttgtaagggacgtcaccaaacccttcacagtgatggatagagttgagtcgttctaggctcaaaagttctgaaatagtgtcaattatggttaaagttaccgtctaaacgatcagcctctgagttatttaaaaccttgtctgaagtataattaacttgtggttacacacctgggtcacaaacgtacgactcttgcacattaaccctgttacattcaatagggttcatgaacgggtttggaaagttttccaaagtagttttcttagcaactagcggctcagaatagtccgataagcttggagattcctcgtttggtaacatctggtccatgtcttcaaattatcaatattaattccaaattataatagaatatattatacaataaattgttaaataaaaataaagatagtataagtgataaaaatacctggaagggaacccagttcgagcatgacggtgtttgtatgctttgaaattccatattttacaagtggagaaagagttgaaaaaaatatactaaaatataaaattttgaaaattttgagtaaaatttccatttaaataaaaattacacatttttttaaaatatataaaatgtgtaacatcaccatacacactcaccaatataaaatcaattatggactaacttattgtttaaaaagtttaatatttgttgtaaaatattattttgattttaaactgcgtttatgtctttgaatccagcgatttgagtttggattccctctccccagtccgacagtaacattagtaaaacttgaaactgcagttgtagatgatatattattttctttagtatcttcctacaaatttattaacacattttataccaattttatactattttagaataatataattatcttggtataaatcagtaaataaaatttacggcataaaaatgtgatagtggatcatctttatttttgcgattaatatttctcatgtaatttttaaatgcaggcattaaaagttgatcttcagctgtaatgtatggtttatccgttctgcctgttgccggcttaggctgcgtataaatagttcctctggtgttaatccacttccttgtatcccttgcgatgatttctgaggtctctgagtctactgttattggcactcgctcaactgttgcgttaccacattttgaacaaaactgtctacaggtattcggatacacttcataacatgccctaaaacatttttacagagttatataataaaaatgcttatacactaattatggtagtgaagttacctgcacatttgtccccatcttcgaatggatttggcgacaaacccgtcaagagtaataacgttaagtcccatttgaatgagtacattttgcatagcaaagtcggtggtcatgcaagagacggttttagaggcggatttcttgacctgaatgttgtaactgttaacgttatgggacccgatccaacagtcaaagccaatgtgattcagatcctttttagatttgttttttgaattatttgtctgtttgtcaattttaagggtcataggagcttccctcaaacatgataaatctccagtttctatttgtaatctccgggttagagctatacatccgatatcgttattggataaaaagggcaaatctcccgttaaacttgcgaagttcctcacaaaggaaacatcctcgggagaaggttcacgaactatgggagtataaacagttctaattgaagattccaatgggttcttttgcctatatttctcaatctccgactttattccgctagtcacatatattttacagccggatttatccagataagtggaacgacagtatgctccggtatcgacaaccagggccttttcattttcagaatctgctgattgagattccgatgaattttttcgtgaattcaaatccatcataggttatattagcaatattttaaattaatttaatgacatttggataagaaaactaattttggaaaaataaagaaatttgaagattctaaaatttgtagaatttaaaatagttaaaaatatgaaatataatacactaaagtaaaaaaagcacaatgaacaaaataaaactaataacgatttatatttatactttaatataaaaatgaatttatcataaaattttgattaatgttgtagaaggcaattagtacctgatattgctaatgttggccgatatttagtaaatttaaccattatccataaaattgtactaatacaatattaattaaattattttaatgtaaatggataattattcgaagttaggtgcaaacgcatttgcgaagatggagaaggtggtacgtaaataattattactgaatatttaacatttttagaactcagaactgttttgtctgacttatggttcaatgataagtcagcttgtacgagataaggagcatagcgatgctgtaaacgagcatttgatattgatgttagtttttgtgtatatttttcaaaatttattaggggtaaaaatataggcagtaaacttgtagacgaactactcgccaaacttggctgtgttccatgtacagattttagaagtaccgttgaagttatcgcaaaagtataccaattttcatctctaacccatttactcaaacacatttatatatttttaactaattttctgtatatatttaattgtattcaatggattaggtcgggtttaagatgtttttgggaatctctgggaatgttgtggaggttgaccaggagaataaagtgtacaacattacgttccaggaaaatccactggaccaatttgtagaattgcctgaaactttaaaggatttaaactactctaatattttttgtggagtaattatcggagctctagaccaggttattatactattactatatacatagtgaccaaaatgttttaacgtaattttagctccaaatgaaggtacaatgttactttgtcaaggacatgttgaaaggagatgatgtttatgagattacaataaaacttgaagaggtattttatcactggtttatgtatttgtaggtggttaaggaaacgttatcagatgaagaatgaattttgaatatttttaatttcatatcacacaaaattaaaatttaatcttataacaatatttaattaaccttaatcatactattcctcaacttcctcttcgtcttcaccgtcatcctcctcttcatcttgtggctcctcggtcttttccggctccttaggtttctctcgctctttgggcttttcaggctcttttggcttctctggttgaatttctgtgtttttaacttcaacctttgctatttctaccggtggaacaacctgagccggtggtggaggaggtggtggaggtggaggtggcggaggcggaggcggatctggaggagctaccaagttagaaataccacgaattataggcttaaagatgttccctaaaaaacttagaaataaacccctattttcaggcggcaaactttcatttatggatctcaggcttttatccattatgtcctaaagtatatttattttgaatttaatacctgatggtcataggttgtcccatatcgcacaccgaaaacgattaacgataaagccaaaatttttaaaaatctcatctcaaaatttaaataaatctattatcctaagtgaaaaatgaacatttaatataaaatttttgtgtattttaaatagattggtgaaatttcaactagaatattcgtatacttataatggaagaaaattcaattattagattcaagttcaatttatatcgagacaaggtcatactctttttcctttctttgtaatgcgtttttaaaaggcttaccaattttgtttaatcgttttttgaaccttttgaggtttttacgaccaggacttgtataagctggtttcagtttattagactcatttggctcataaattttcttcattaccaaatttataatacctgctttgcactcattaaggcactaaaaagcacagttaagatatataaactaactgatattgcatcgaagtcatttctcgtggcgtcgtcactaggcggagtatttccacaagctttaaagcaaatgtcataaatgcgttcgtttacggaaacctctgatttgacactcataattaaataaaataatgtagaaaaaaatattaaattacaaaataaattcatttcatcgtgttttataatttaaactagaaattaaagtgtcaacacacataaatatttttttgtggaatttattttcaattttctgatctgacaaaaatagataaaaattgaccaataaatgaatgaaatactacataaggaatatattacattataaaagttgtattacactttagtataaatctttaggtagttacaagtatttaatttcatcttcactcaatagacgaccatactggtctttaaaatacatagtcattgagccctttaccttcggagcttcagtaccctcgtcttttctcagtttacaaggttttgagcctttacggccgcactcctttatcttttccttgactaaattaaatttactattgcaagacttacgagcaacagcagagtttgtttttaaatgagcattcaagcggtaaactccttgcctagtcataccccctatgtttttcaaaatttgagcctgttttgatagaatatcccttgatgagttcctcaacttgcccctaaactgagacgatgacaatgcatatcttgatgataggccagttggattacttgttgtactacttaattccggttctacaggagctttggatttggatgttttgtttctaaactcatttactaccctcattgtggaaaccttcgtcctatccgctactttttccagggtttttcctgctttggataaagtgtttcttgcatttttcctaagtttttcgagatttgattcattagatttgggtagatcatatggctttacatagtgcatgccgtcgtaactagcaggtgtgtgaatgggttcaggccctgcatcttcttcatcatctgattcatcatcagaaacacttaccatgccacccctgtaaattttttctgctttagtatccggagtataatcgtcatatggagtatacccgaatgtggtgaaattacccctagtaagtggctcaatgacctttgtttcgtctgaaaaagttacttttttctttttattgtttccagaacttgtgcttggcatgtctttgctaacggtaacaactgatttcttcttagattcaatgggagatttacctcctggaatccttatcacgtcctcctccttaatactctcaagtttaacattgcccttaggaccgacagaatcggttaacttcttaaccaatacagggttaggctcaaaaggcggaccaactgtagtttcaaccttaaccaaaggcctctttggtaccatcagagtctcactagtgaagtcaacttcatgtccagatccaccaggtaaagttgtgtcaggtattgccttgcttaaactgtcatctgcggtagggtctgcataggctgcaaaggttgtgttaccagttataaaaaactcagaaaccaatttggagactattgcgagtaatataactcttttgataaatgccatttatatatattagctagaatctaattacacattaaggtagaaaggtgttgttaaatatagattaaaataaaatttatcaacttttaagtacaaattatatataaaatcgatactaataaataaaaggcaggaaaaaaagatctaagaggaggaaggatcttgagaatttttttagtatctctgaagcaactgagaaaaaatttaggaaaaaaaggagccatgtcttgatatgacaacaaataaaatgtaaatattaaaaataatctaaaattaggtaaaaatcgttctaaaataaataaactaaaggaaatttgtggaatacttttaataagaatcctatagacagttggagaagtatttaaccaactaagtacttaaaatacatatttcataaaatataagtcaagttatactttatatggtgtaaaaaataaaagttgttgataaataaagcattgtttaacaatgattaatttccccacacatctaatgtaattagataaattagaaactattaaatcattggattccaataaaaaatatttattatgatcaattagttattatatgaactgattttacggttccttttcctccacgatgagcttaaatctgtaaataattacgcttccccaaatcagttacaatttcagggtaaataaatgcttgttatataaaattgaagaatcatttcatattattcaaatactttcaagtctataattgtcatttgtaaatttatttcttcatactattgtgtttcaatccttccataagttgtttaaattaatatgaccacgaacgctgaagatcatttgctaaaacaagtatttttgtttttatataccaaaatttaggatctttccactttagatgtcaccaaactcacatctttaactcccgaagttatcagcagacaggccactattaacataggtaataatttacatagtcttccacatttataaacactaaataattatacattttaccgctatttcccctttaaatatgattattttgtttaggaacaattggccatgtcgctcacggtaaatcgacagtcgtgaaagccttatccggtgttcatacagtacgttttaaacacgaaaaggaacgtaatataacaatcaaattagggtaaggcaatacttcctgacgtatacttataataatccataggtacgcaaatgctaagatatataaatgtactaaccccgagcatgagccgccaagttgttataaatcctacggaagtagtaaaatagacgacccactgtgtgaaaaaccaggatgtggacataaaatggagttaaaaaggtaccaaatccaagcatattatagtataccaaatatagtataagaccagtcaacattatctaataatttgatagacatgtatcatttgtcgattgccctggtcacgatatattaatggctacgatgttaaacggagctgcagtaatggacgcagcgcttttgttgattgccggtaacgaatcttgccctcagccccaaaccagtgaacatcttgcagcagttgagattatgagattgaagaatatattaatacttcaaaacaaagttgagctcattaaagagtcccaggcactcttaagacagcaggaaatcaaaaagttcatctcaggtactatatacgaataatagtagacgggtacacaagtaaccattaaatttattggttttgatgaattctgtaggaacagcagctgacggagccccgattatacctattagcgcagttttgaactacaatattgatgtaatcagcgagtatttggtgacccaaatagctgtcccaaaacgcaactttaccgtcccaccacagatgataatcataaggtcatttgatgtgaataaaccaggagaggaaattgaaaatttacaaggcggcgtggcaggaggcagcatactctacggagtattgaaagttaacgacgaaattgaagtcagacctggcataatttccaaagaccaaaatggacaaatcacatgtacatcaatcaaatcaaggtactttactacatacccaaaacgtttgaataatgtacacaatatcacaacaatttcggataatttccacaattataatttccatgctactatagtaataacttgtgtttagagtgatatcgttgtttgcggagcagaataacctccagtatgcaataccaggaggtttaattggggttggtacaaccatggatccaacattgacaagagcagatcgattagtaggacaagtgataggatatataaatactcttccagattgctttatagaaattgaggttacatactatttgctaaggtaataaaacagtacaagaataatgttttaggaggttgctgggtatcaaggtcactgacaatgataagaacgttaaagtgtcgaaactcaaaaagaacgaatttttaatggtaaatatcggatcaacgtcagttgggggaagagttacaggaattaaaccagacatggcaaagttcgagttaacaggacccgtgtgcacaagaataggtgataaggtggcaatctcaagaagagtagataagcactggagattaatcggctggggacaaatcaacaagggaaaatcactgcaattaatctaaatctgtaacaagtaatataatggataatatataataaaaataaaacattaaaacaaaatgctaaagtgcgtgtgaatgacaaaaaaggtgtgtgctgtacgtaaacaacgtaaaattacaaattgcaacaattttttgcaaaacaaaaactacatttaagttcaaaattgtgtatgttaggttaatggttgtgtgtaaattaaccttttaaaaatacaatacaatttaatttatttgattgaattttcaagtattcaactttaaaaagttggttaaaactaacaaaattttaacaatttaaggtatgtcagaggtttgaattagaaactgttttaagaacagaataagaggatttagatcatgtaaggcccaggatcagaggactattccataagttcttgagtggacccacgaagttgagaatcctcagattgtgtatctttcggtttggactcagaagaggtggtagaatccggaggggatgttgcacttggaccaggttcggctgtttttgcttctttgggttttgaaggcgattgcgccttctttggttgcttaacatttaatttcttgattttattatttgcaaatgagaggtaaaaattattcttggtcagctctagatataatacctttggatatccaggcgctgtatcatctttataattgtagattatttcattattatattcaattttgctacactcggcatcatcaacaaattcatagccaagtgaaaaataactcaaaaacaactgataatcagaatcttcaaattcactatcatcttctttcaacaacttcacatctgaaatcttatgcctggttgaggaaagatcttcccaaggtttattctcgtctggtttatggaaaatcgacaaattagcattactgtctatcattgacaaatatctgtctttttcgttctcggtaggttcctttaaagcaactccaagtgaatattcagtgggatctttggcttcccaaattacagtttcggaatcttgtaccttgttaaaggcatgagtatcctttgcagaaaatatttttaaatctgcatcagaggaataatcataatcactggtgctctttagtttggatatatcaagtgtaattggaattttatgtcctttaactttgtaaggttgtgatggttcagaaacttcagtagactggtcatgttgctcggaagtttgtttaggttcttgaggtgatccagttgttttttcagaatgttttttaggttcttcagaggtttccgttgtttttccagaatgtttcttttcttcttttttgcctgtagaaaatgctttcttgaccttggatgtcagtttccccttttcttgttctgtgcttcctgctgaagtgattgactgtgaatcactggatctatcatcagaatgttcagaggctttatcgaatttggattcaggagcggaatgttcggaagatttgtctgatttatcttctttttcaggatctgtaggttcatctgcttcctgagattcctcttcctcctgttcagccttttgttcttcacttttactaagctgagtgccatacctacgaaccgttgtcttccactcattgtcttcaaatgagcagaaaatatattctctttcaaaccttaggacaaatttcttctgatcactgttgtaggtaagggacttcggatgttggttgtcagttgctctttgagtccaaacagggttattgtcatgtttaaccaaagtacagaaaacaccagagaggtcatactcgtatacttgattttctccgtcccaatttacgttgtacttagttgaattaataagtacataattaccagatgaacctgttttgaaaagtttaacagcagaggggccagtagtttttttgcttctgaagccactgaaaggtttccactcttcattaacaaacgaggaaaagtgaacgtactgatcttcacattcaaccttaatagtactattggcaatattaaagacaacggaagtaggataataatttccatttttatctgagtcataactccacacagatagctcgtcgtattttacttgagtacatttaactccgtagaatatgttacaggtaataactggaccaataatttcttcatgaaagccagtgataggctgtgatagtccatcttcatttgtctcatagagctttaatctatagaattccttgtttttagtcagcttggatgctttatatccatatactgagtgccacttattgtcataatatgagtggtatgattcataattatctttggactcgacaattaggaaaccattgtttctattaaaaataatagtcgtcggataattcgatccatactcatcctcttcatgtttccacgccgaaatgttatcatacctgacttcagcacatttcacaccaggtttcaaattatgtgtaagaatatgcccagcttccccccttctaaacttagagtagtcgagttcgtacggtctagtgctaagatctagagagaaaagctttaatttattagcatcaaacttataggccttagtagtcttcaatttgttgccaaacggcatttgtttccacttgcccttgtgaaaggtatacaagtaacgatagttgtatccagattcaacgagaagaaagttcttgtttttggtaaaaacaactctggttggatagaactctgcatgttcaatactatcatgaacccaagcatcagtattatcatactttacgaaagtgcattttacattttctttaattgtgaatactagtgagttgtaggagtcctttttctcatactcagttgttttaagttcaacaagttgatcgggatcggaaggatcggaagaatatagtttgaatttatcaatttcgacagcatcaacttttcttttcaatttatagctgaaaggcaacaacttccactctccgttttcaaattcaaacatgtaacgatagtcatacccagactctacgacgagataatttttctttttaaccagagaaatagttgtcggatacttatctccatgttcactatcatagtgttcccatactaccttatcatcatacatcaagcaagtacagtttgttaaatagttcatattgtatctaactaaagtatctgactcttccttgtcataatgagctttagtcatctcaacacgtttgttattattaaatttatcataggtaaagagtttcactttgcatatatcataggtaattgctgaggaagaatgggattttaaggtgtaaccataaggtaaaggtttccactccttattttgatagacgtataaataacggtagtaatgagaggactcgaccatgagaaaactctttgatttattaaaaataacagctgttggatatcggtgggcatgctcattcctgttataggtccatggaaagctatcttcatattgtatggaagtacacttgacgttcgtgttgaattttatggctagaacattgggagaatactcaatatcgtattgactggaatcaagttcaacaagtttcttataatctttgggatcttgagttaaaagtttgaacttatcaaaggaaacgtttgatgttttaaaaccgaacggcaattctttccatttcttatcataatatgaatatacataacggtagagatatgaagattctacaacgatgtaactcttttttatatttaacaggactgttgtgggaaactcatctccatgttcattttcattgtatttccaaactggaactgaatcatatgttatctcagtacacagggaaccggacttgaatttgtagctagcaaaagatggattttctctggtatacttggtataatcaatctgaaccaactcggaagtgactgtaccatctgaagtttctttagtttctatggtgaaaaatgttagtttgtcagcatcaaatttatcgtaaatactgtactgggactttaatttatcattcgcacccaatggtttccacacattattttcaaattctaacaagttacggtaatcacctgaagactcaacaactaaatattttcggatcagattgttgaaggaaattgaggttggaaacttatccttatggtcactttcactatgtttccaaacttcagtttcaccatacttgacacaggtacacttaacaccagggttaaatttatatacagtgtctggttgctcgataagatattttgactcctcaagctcaacggtgttaccattagaatcagttgttgacatttttagttttgcgggatcaattggttcggtcaaatttgatttataagaaaagaatggagtaaacttaccagcggaaaaggacagtccgtgacgatatattccagcacagtccacaatgacaaccttttcgtcagtgttaacagagagtgatgtgggataattatcttcatgttctttataattataagaccatattgaatcaccctcatatttgacatctatacatctggattccggcttaaacttgagtgttgttaatgggccttccgaagatttatcaaaattagtggcatcatccatgactggtgttccgaacttattcagtgtgaagattctcagtttatctggataaagtggctgcaaatcctgagttttgtaaccagagatacatctccactcatcattataataggtgaagtaatattgataatgaccttgagactccagcaaaagaaaattcgtactggtgtttaagaggatattagaagggtaataccttccgtgtctggatttatcatattcccacacagttttattgttgtatttaatttcggaacatttcgtatcaggttcaaacgtatagttcaccaggtgtgtcagatcttcaacctttaatttactatcatccagctccatagatttgccatcatcacctaaagctaaaagcttaaggtgctcagaaaagacagaagattgtgactgtacggttacggaacctgatggtagtgccgtaatatcgtgagacgatggctctggatcattgacaatatggagttcgaagtctttatcgttagaatatacgtataacataatttttccagcctgtccataatttgccacaaccttgggtgaagaaggcctaagggattctttaaggtcatgttcaccttttttaactttcgaaaacctgaccccggatttagctgtaaatacataattatcatctttcttttcatattcataatctcttgtggtctcggttttggtaaggtcaagttctactaatgtatgctgtgtagatggttgttctgaagattctgtagattcactggatttaagtgattcaggagtctgtttttctgtagaagtatctggagtagttgaatcttcttcctcataatcaacgagatcgggtggagtggttgaatttggcggagtaattttctttgatacatcattattgttcacgacaaagagatggttattatacagatctagacaaactccttttaaaaattgaaaattagggtcagaatcgtgattccagacaatatagcttttaaactttataagatgacagtttgccaaaaggttaaattcataccaatagaaaaaattcaccagagatttagaatattgattatcctttaataatctatatcctgaagtatcgacatcgtaatagaacatctttagatctgataaatttagcctattaagagtaacatcttgccagggcttatctctgtcaggcttatttaacagtaggaagttatcgtctgtacgtaacagggccaagtattgcttgttaggggaatccttaaatactactttggttgagtaataagcgggattaggcggttcaaaaacaacttcttgtgaagggtctgaagaagctgaatctactattttgttgaaaagataaacatgtctcgcctggaaagttttaaactctttatccttagaaaactcaaactcatcagtagaatttgtttttttaatatagagactaactttgttaggagtttcaatccacttgccatcagaataggccagatgtttaatgtcaccactgcacaaatacaaagcaacattcttagtttttcctttcctagtttgaacatctattattacaatttttttagaatattcttgaacgtcattagctctccaaatgactacatctgcacccaaccttgaagatcttactaatttgtcgaatacaccagtacctgttggagtgaatatgacacgatccttctctttaaagcattcaaactcatcagtactttcagttttgttcatgtctatggtaactgtctttcctctatctaattctcttaaaacctttatttgctcatcgcgatttaggatatacaggttacttctcataatatcatgataaacaccctttatataaccgaaatctcgatgatcatcatatttgtagacaacaatatcaccaaatttgataagataacattttacagactctttaagtgaatatccgagtgataagtggtataaagacacgttataggtaaacgtatccagttgcttatagacagaggaatttgagtccttgctaaacaattttatgtcataaaaagaatgattagtgtcagtataatctattaaaggcttatctttagaaggggaatgaaacactaaatagtttttgctagcaagaagtataacgacatatttttcatgggttgaagactcttttagcctcactttgatgccatagtcattattgtgggatttccaaaaggttttagtgccaattttaacctcgttaaatccatttccgtgacgtgcagtgaaggttttataaattccattgtcggagcattggtacttagcagtattatcagaactttcaatattaagtgtcattagactagctgagggaatattaacagttgaatctagttcaggcaattcttccacttcgatattatcaacagaagatgcttgatcgactgatttatcaggttttaactcggttgctttctgctttttatattttggaggtgaaacttccttagtcaaatcaagtgttttgttatcattttctaagttagtaagaaagaacttattggagacaagaccgagataaagacctttcagggttccaaattcttggtcagtttcataattatagattagcttattttcgtgtttaattagatggcactggacattgaaagacacaccatatgaaaattcattcagacccagagtataaccactagaatttagttctttatattcacatatatcttgatcaaatgtcaagaacttaaagcctgaaaaattattccttgttggggttatgtcttcccatgaatctttattaacaggcttgtgaaatagaatgagttcaccggtatttagtatgaaagcagaatgattatctgttaatttcattctaaccattttaacatatttttcggatccctcttgggcctcccaaaaaacttcttctttactaaaaccagtggatgctgattttataactttgttaaataaacaaccaggtttagctctaaaggtagcaaattcatttttccttctgtatttaatatggttggacgtagtggttttgcttaaatcaagttgaacaaaatttaattgtttttcaggttctttttgtggagtttcttgtttttgttcttgtacttgttcagtttcgggtttttgtttagttccttcagtatcttcagttttttcagtttctgtctcttctttagcttcttcagtttgtgttgaatcatctagacccgctactgccttttctttatctattgccttcttgacatcattaacgttaacaataaacaaatcctgggtaataagtccgaaatgtacctgttttagtgagccaaattctttatcaacctcgtaactccacactgttttcccatcatagttaattttatggcaatcaacatctttatcaaaagtaaatacataagataaatttagcaatgatggagtatactgatcagatttaaagactctatacttgttatcttcatctttgtgaaataaactcagcttgaagaaatcacctctaacctctgcagttatttctttccaatcttcgtcatcctctgactgattatagattaagggattgcctgtcttaagtaggattgcaagatatctattaactgtatccttaaaggatacatgagtggcatactgactgcgaacaggggagaaccagataaaaccatcgtttaaatcttctttatcttcgtcttcatcttcgtcatcgtcatcgtcatcatcgtcctcctcctcttcatcttctgcatcatcagaatcctttacttttctaattcctttgccctccttagcagaatagtttttatatttgttggtttcagggcgatatatctttatccttctaggttttttaaatatattcaaacgagttggcctcttagttggtctagatttacgggcaataggccctcttggtctttctatctttgtgttttcttctaaataatcataaccttttccatcagtatctttaatgtctatttctatcatatcaaccttatcttcttcagcaagtaaagctgcagtagtttcaaaagcgttttgaggttgctcagaaacctctttccagaacccaccatcattgggtttgtataacatcttttgaccggatctagtatctaaaatcaatacttgtttgcccttgccaaaatcttcgaatgatatgctgtttgcaagttcgaaagatccctgtatttgccaaataacggtccaggtaactttgctttcaccggttgttcttattactccactaaatacaccactattcttaggggtgaatgtaagaacattgtcggtcttactataagtatatgtttcagtattttggagatcgttaaggtctaagactgttgtatttacttcagtcatttctttggattctggaagcgcctctccttgttttaagctatgtacttttcctttccattcaccatcttcaagtgtacaagtaacaaacttatcttcaaatgtaacaacaaatttattctgatctactcttaaagtgacgtacaaaggataattttgagaaccactctcaagctcccatacagtcttgtcttgatacttaattgaatgacatttggcatctttctctaaatcatagatgcactcgtcacgatcctttgacgtttgatatttggatttactaagttcgaccaggttttcagatgaatccatggtgaataatttaacaacatctggattaaatgattccttatcatcgtcttcagtcttggctttagaaacctcagaaacagttggttcagttttgccagattcaggtgaagcttctttagtaggagtggcaggttcttgtctatcagacgaagacgatttaacgaatgttctcacccattcattacctgatttagtatagttcatccttgtatcatccagtaatactacggtgaaaaaggtgtatggaattttggctgcatgattaccgtccgtaataacagtttttgcgtactgcttggattttttagcttcccatacaactttaccactatatgatactttagtgaaggcatgattttttgaagagttaaatgaactcataccaaatgatcctgcaatttcataagtatctgtttcgccaatcaatcctccgaaatccaatttaaggggtttataatatttaatagaaggatctggctttggtttgtctgaagtgtctggttgttgtacatttaagttctttgttttaccacccttattcattatatacaaattatttcgaacaaggtgtacataaactcccttcaaaggttggaaatcatcatcatcatcgtatctgtatactaccttattattgtgtataatttgataacattcaacattatcattaaaggtgtaaccatagaataattcgatcaactctagtttataggtgttggaatcaagttcggtacgatcgcgcttgaacattttgagattagagatattatgtctataataacttatatcagaccaaacttcacttttgccatctgaataaagcaactgatattttttggaaccaaaaagtaaaaccatatattttttatcagcattttcctttaatctcactagagtgggatattcattaccagattcccaaatatcatggttgccgtgcttgattttaccaaattcgtgtccatttttaggagtatatgtaatcagagtgtctaccctgatacagtcatactcacttgtaccatcagtatttttgatatctaaaactatttcagcagaagatacccatcttttatcggaataaactaattttacaatttcaccattattgagatgaatggaagaattagtaaagttggagacaggagtcaattcaactttaacacaatattgttcagaatcatcatattcccaaacaagttctttatcacgcgttatctttatgaatccataatcttttttggcagtatatgtaacaacgttattaccactaacacactcatagccaactgtactttgggtctttttaatatctaaaaccatttcagttggagcagaccatctaccattaaaataaataaatcgttcaattgcgccacctggtagatgtatggtaacaccagcaatatccgaaccaacaattttacattcaaccttagtacagaattcttctccagactcccaaatataatctttatcatgtttgattttattgaaaccatatccttcattagcagtatatgtgacaagattgtctgtcttaacacaattataatgatatgttttgtcagtctttttgatatccaaaactatttcagttggaggtatccatgttttgtcagaataaataaatcgttcgatatcaccatcggactggtgaataataacatcactaatgtctttaacgatcaccttacactcaactttaatacaatattcgtcttcatcttcccaaacatcatcattgtcatgtttgatcttattaaatccaaatccttctttagcagtatatgtgacaagactgggtgtcttaacacaaacaaactcatttgtactatcagtctttttaatatctaagaccatttcagttgaaggtatccatgttttgtcagaattaactaatcgtacaatttcaccattgcgaagatgaatgcaaacgttagtaacgtctgaaccagataaacatgtgacaactttagtagcataatcagcttctgccctccaaatatcaccagaacctttaccggatgatttaattattttatcaaaaactacaatacctttggaagtgtacgtaacaacgttattttctgtaacacactcatagtcaactgtactttcggtctttttaatatctatggtagtttcagtagaggctatccattttttatcagaataaataaatcgttgaacttcaccatcatataaatatatggtaacgttattaacgtctgagccagaaggaaatgctactactttggtggcgaaactagtttcagattcccaaacaatttcatctgatccaagggtccttgacttaattatcttattggatacatatccatctttaagagtgtatgtagcaattttgttatctttaacacaatcatattcatttgtattatcagtctttttaacatctaaaaccacttccgttgtaggggaccatgctccattaaaataaaataaacgtttaattttatcatcagataaatatatggtaaggctgataacgtccgaaccagataaaaatgtgacaactttagtgggataatcggtttcagagtctggactccaaatatcaccagaacctttaccggatgatttaactatcttgttaagtacatatccttctttaggagtgtacgtaacaacatcattgtctttatcacaatcgtactcatctgcagaatcactttgggaaatgtccaaagaaataggatgtttactaacttcgggttgtgagggctctggatgactattatcttgagaatcttgagatgtatcctctgatagacttttttgagaatattctacagtagttgatgattcagttgcttcttgggcaacctgtgtagtttcagaatcttctgaatcatctacaaaagtaaatacaccatgaccactctgtctggaaggatcggaagtactagatttagtctcgttttctccactggttggtgtagttggagttaagggatcaattgaacatataaaattttgtatataagtcaatattaagtataaatacaaatacctgtatatatggcgtgttctcatttattttaaaaatagactagcattccaagaattggaataaaaacaattctatggaaggcgagaactcacaggtaattacagtcattaatccgttattccttctgttacaggtccatagtcgatggggaaagaattgatgttagcctttacaaatacggaattaattacaattgatattagatcatatccataatgtgatattatacttcatttaattgaaatagtttagaatttttaaataataaaatcaaatcaaagaaatacagtattattactatacgtctcagtatcatttgttagtcagtacaacttaacctgaggtgtataaaaactttattttcacttttataagttttatcaaacaaaattccatccgattattagcttattgagggtcttccaagcagcttattatataaattatatgatatgctataaatgctgattaggtcctatcatctgatatattaggatagctcaagtatgccttgaaataagaataaccaaagaccattttcaaattataatatgaaacaatgtgtaaaaataatgccattgatctcgtttttttgatacaacaaacattccctgaataataatcacattcttaataagtttccagattgattagccctcactataaccacaacttacacaaatagactttaaattgaatttagattggtaaaaacccaaaggaatataaacctatttgttattaatgctttactttctattagagccataaacagttgttggatttccgaatataatattataccttagcatctaatttgatgaaaaataaaaaggtgacaaaataaaaattttaaaagaatgttcaatattatcacaatttaatacatactgattctttagaaagttgttaaaaaaattgggaatgagaaatgttagacattttatattattaacccaaactttaggaacatgatatcctgagctattgaaaatgggagtttaaagagatttatattaaaataacattaattttagttaatataatcatctatttaagaaaatttatagtttacggtgatttatagtacatacctttatttttggaggaagactaatttacagccataaatctcagtttttaattcaaaaatggtacattataaaaaacaattaaggtattattacaaacaatccagatttgtgacacagcttattaagtatcactcaaatttgaaaaagcaaagtccagaaagtgatgtttgcttaataacaagggatatacaattctccatatcaattctatgaattttcttccgtaagaacctggcctgtatgtatacaacagattaattagttcaacttacaataaaatccattacaattcaatagggatgcaaatacactgtagacaacattcagtggagatatgtgatgaaaattaatgaggaaaaaatttattaaagtggaaaattgttaggttaggaggaaaaaatttcctcctaaacttgttgatagttaaactaatggtttagtagtcacaacaatttaaatagttattaagtccaatgatgaataattttattagaaacgttataaagaaacaccaaggtaatatatataaaatgagtgattaattgataaataatacagaattggctaagttaatattaatttttggaatttctgagaataatgtaaaagatgtcaacctattacatatcataactaatatcgacggagaaaatgatttatacaataaatgttgcctaaatatatttaaagtataattttcaggcatttatttaaaaggtgtaaacattttactcagcattcagtgtaatattatattgaatgacataaaactaatggaccaaagggtatgtctacctcaacacattttaataaatttttttcaagttaaattttctacaattaccgaacgtattaaagattcctaagagcaaaacgaaacgtagtaggacagttactactgtcgtaaacacatctgagcttaacataccaaaaaaacagttgattgagtacaacaataacaataacatcaagactccaattccgataaatgtaaacccatttttcctagaatttatttattttcagggttataacaataataaatctattatgggactaaccatatatagtcaatatgaatttgacgtaaataacaacattataagccacaagctagacatttgcaaatacaacaaactaaataacacaaatgatgaaaataaaatagcaaataacataaaggataggaaaattaaaaaatgtgcaaaggggagtaggaatgtcaaattacacttgattctcataaaaaaatacaactcatatgtaatttatatttgatttatactttaaattatactttagcttaataataaattgaagagctctaaagatcttgataccaaacaaccttcctacaatggtattcctggcaagaacaatcgaattagtgccactgaacaaggcaacaaatccataaatggcaaagttattaaaaagccagatgttactcaatatgtggacgatataatgaaaacggttgaaactaagggcgtgtgtgatttagatcaaatattcccaaagggtggaaccaagttacttacttctcagtactttctgaatctcctgattttactaaatgagaataaactacaattgactttaataaacaaccaaattaaactctctttaatatcataatccgctcatactctttcttcaccaatggttcaattaatcataccaatttataccctatatcggatcgtttgatatatatctatagagtccttattattatcaattgctttacatttaaatgtattttagaaggtttttaagtttgatatctgtatgtgttcatgaattgtttaaagttctccttggtagcattgtccaaatgagtattgaagaaattcattaaataatctgatacatttaaaaataacttttgcagatatgtgtggtataggtatcctgctcctttaaagtggtctgatcctagccaaaagaagaaaacgagcttcgcttccttgtacaagggcaaacgcttcataaatgggaccaaactttcaaagtatgaatttgttaaatacatggcccagtacagtaagtgatgggccgtgtaaacgcattttagatttgattccttactcactgcttccctgcacagttctcgttctcccagccttccatcagtcttaacttgttcatttcccgctccctcactaccttctctagctgtgtgaggtgtcgtgtcagtggttgtgttaccgctgtttgtcaagggatggttgggtgatgctgcataataattgttacttttgtataggaacaaaaaggttttataggcagggtacagctgacataataacaggtttagaactcgatataaactgttagataacagaaacataatattaacgcaatattaaaatgtacatagataatatatgtatagtaatctaggaatggggatgatattaactttcattatgtgttatgtaaataaatgacactgatctgtaaaatgatgagaaatgaagatttggataattttaaataatttacttcgtggaagactgtatatttgtgagttcactggcccatctgtacaacgacatgtaacttttgtaattttccctaaatttcattaaatttatgaaaattaatttacagtgtaatttgaaataactaatttccataccctagaaatgattccgtactcttatcctcataaatgtgattggataatatatgtatttcactatacacacgatccgggttatcaaaatccggggatctaacagtaatttataaatatttaaatccaattacctgtaatttaaaatttcaggaaaagttggaggttctattgtagagtagtttaagccaggcattgtattgccgtatacgccagttgcaaactgaacaattatgcacaaaaatttaatttattaattttaaagctatttccttgtccttaattagatacttttatctaaatagttattagttattacttgttcatgatgtcgaggaatagtatagtctgttgatttaaaattggttatatctatgtagttgatcacgccgttctctgtattaacgcaggcatcatctggagagtattgataaacgttatccactgagaattattatgattcttatggaaaattacctaaataacggtatttgaacatttttctaggcagttcctgtatagtggtaaagcagttagtgcttttaatcatctttataactctagtattcttattctcatcttcgttatactcaaccagatacacttcatttccgccatagttccagctaaaaacaaattaatagaaataatacacatcaataaggattaatttaaagtattcttacttgaacacaacagtaacatggtcctgagtagaatctgataaatctgagccgtacaaatcggcattatgtggcattggcctgtttatatcatttcttcgagtaggttttgaaattaagtcggataaagctggttttatctcgtttccaaagtctttgctgggatcataatcatcataattgggttcatcagaactattatctacattatatatgttcgggaaactttgcgatttattactcattaaaaatactataatataaatgatatagtacccaatacctatgttaacaactaattagtggaaaacattatatttattatctggtatatttattttaaccatggaaaataaaaagaagatttttattaggggattatctgacgatgttgattctaatttactattctccgccttttcacagttcggccacatcactgatttaaatataccaaaagataagttcacaggtattttaattgttatttatacaaatatatttatttattctttcaaattctttattttcttactaaaaattcctacagataagaacagaggaatagctttcattgagtacgaagatgaggaggacgccaagcatgccatttttaacagacataactctgaattatacggaaggattataaaagttggttattctcacataaattaacactaaaatgcaataattacatcgacaaaatattcacattaaattaattgttaaaatggcagtttactgaacaatttgaaatttttaatgattcctaaaaataatattttaacgtttgtttatccatttacctttattaaacggattttcccgatttccatacagtttatatgtgtattcgtatgttgttagattcttcaatattaaatatttgtttaaagcgttcatataaaaaaatgccaaagagcatagcaaagagtatagtgtgtaaatcaagctataaatgtgaatttataaattaataataatagtaaacttacaggaaaaaatgatttttgaataaaaatacataaatgtccttgtgtaatatactgaattttttactgtacaagctctgaaacattaaattagataaagtttaggtatagaaatagttgataatttattacctgtatgatcttgaatagtagcacaaaggagtattcctttatgaccatgatcaagaatatgaaaaaaacaaatttcttgtaattgttgtgtccgatacagttggacagactaaaatgattgtgaaataatattgaacatacaaataacagtgatgatcaaagcggcgtatacatctgttacaaatgtagcagtgtttggctcgaggaggtctgtagattttacatttttctaaaaattgatcagaacacaatagtttaacttacgacaccacttctggagaaaatcgtagccgtttacatttattaacttggcttgaacgttagtttccaaatattctgacaagccagtgtgagatggaatcacacccgggtcggacttattgagaatcctcagagtatataacttgaggaagtatagtattaaaactattgctatatggaacaacttgtttgttttatctttaatatgttttattctacaaataaatgtaaagatcaggaacctacatgtatgaaactagaattatcaagtgtaacaaaacagcagtgaatatgctttttataacatgtggattcgtctggttatctcctgattctataaaaatattaagggaagaatcaaagatacctggtgtaacgtcggaatcaagaggaatataaccatcactattcataatttaacaaattaataaataaataaagaaattttacaaatttaaaaaacacaaaacaaattaaattagtggaagatcataacagtgtatcaggaagcatcacacagaatggaatccttttaattttaattctcattatttattttattgaaacatgttagaatatgtataatagtaatgatatattaaacggagagtttaatatacaaaagtgtagtcatttaactgataaattagaatctaatacagaatgtaacataaacaattgtaatataaatagatttaatcccagaataagtgtactatatgatatactgaataataaatgtaaattgaataaaaattggaattttaaagtcgatttaatttcatacaagtcaatagatgacataaattttttaaataatttaaattccttccaatcgtatcttgatacgaagtataaaaaaggaaagaatgtagttgaaaatatagatgaaataggagactcgaattcagtaactctggatgatgagaatgaagaaatattgaagtatataacctattactttgtagaattcgtctgtgaaatcgagaggaagttgaaaatcaagaattataaacagaaaattgtcaaattacttctaataataccaaatattaaggattatataactaactatgttagtgatattgtggtccaattacctcaaaacactttacaaatcgctctgtactataatatctatataaccttatccttgattatagaaaataatctaggaagtttaaggttaaatacactttctaacacaataataaacacatacattaacaacaggaaaatacacctagagactgatgtatttgaatcagcagaagatgttgtagattttttatgtactggcggcagttctaatgttgtggttaatgatggaattgttagcaaagtggatgaagtcgtgctcaaatgtatgaatgtaatactagttaaccacttgtacagtccagaaactagagttctgatagtaaaactgttaaagtatttttataatataatagccaacaatgtgttgacaaatgaacacacgacaatagtaacatgtaattttatatacacactggaattgctatatgaccattttcacattagtttttacacgatcctctgtaacatgagtagagataatagttttaaattggtcaaaaaggtgaattatttcaattatttgtacattataaagtcaattttaatatttttgagccattcaatcaaggacttggtggataatgaggaaaatttgagcttaagtccccaattggcagatgactggattgaaatattaaataattgttataaaataataataagtgaagtgatcagtgacaataataaatatatcagcaattatatcctactccaactgatacacctgtatttgattaacgtaaacaaagtagctctaccatattccgaaagtagaagcggtgataaatatcaatttaggaaagatttgggagaaaaattggtcaaattgtataaattgctgttagaaaatgatataagtgataagaaaatactaaattatctcattacaacaataaaaaggattgacatcaattttgatattggaaccattagtgttgttaaagaatccgtaagtttggagaaagtgtacgattattataacaaactagaaaatggaagcgtaaaatatacaatattagtacacaatggacttaaatatataatgtacaatacaaacacaaatgatgtcattagacctaaggttagtttaggacacgtgctgtgtaaaggagtcccatttgtttctgagaataaaattgactataaaatgataacaagtgataagttaacaatgatggaaaagttagtagttaacacaaatgataaattaattaatttgattccaaattatatcaacgtactgatatacattaatcaaattaagacgagtgaaactgtgaatgactcatctagtattgagtctggagttaatggagatcagtataaagaagtttatgctataagtaaagtactgaataaatatgatgtaagtaaagttttggaaaatgttgaaagccctgaacttatccaacttaaagatcttaattttctactgactattcttataaacaatcttaagaacataacaattagtactaaaactaggtcacactgtaagttaaagcccaagttatactcgataccagaattgagtacgtcgctgttgataacaggaagaggaacagtggatgagattgaagttattgtgaacgataaatataagctggacaaaaagacgttttactataatctgtactataataacataaatatagtgatgaatataataaggttcatttcaaaccataagaaatttcacgaggtttttgtcctgaagtttcttttgacacatgcactagataacattaacttgtgtaaccacaattatttcatataccttattaataacataattagcaatataataactagaatggcacttggtggaggaaacactaaaaataataaaattaccgggtctgaagataatgaggtttcggaacagtccttaatacgagaaatattagtgttgctgtataataaggcaaacaacgatatagtagtgaatatactccacaactttatagttaaattgcacgaaaatctagaggctaggagattagtcagaactcaacccttgttttcatgtcttttacataagttgtatacattgtttaaggaagtcagtgttgatgataagttgttgttgtttaacactactctaaaacttcagaacttgatagaggcaattggtggcgagagatttaacgacagagatcatgaaccagataaggagcaccacagtgttgttttgctgaattacatcaaggaaaatataaccctattaaacagtgtaaatacaagtaagtacgaagttaacgtttattacattctgttatatttgaatctctccggcaattacaataatccacgaaggaatagaatggtaaacgttattttgtttgattatttaaaaagaacattagatgtggaagttcgtgctgctatagatgatattagaacagacgatatactggaaacaatattgacgataattcgacattattatgagaaattgaattattatattaataataatgttaacatactggctatttttaatttactgtatcactacattgaaagtagtgataattgtggcaatgagaatgaagtgttggttcaaacatacaggtatctagtgtgtataatgaataaggtgataaacaagtacatttcatataataataatatgcttttcttggactgtagaggatattatatagaaaatagtattgaaagaaatggtgatggaggtaaggatacaggagacgatgaagctaagcttaaaaactatttaatatacaagttaatgtttgaagtgataggcctaattaggattttagtggggaagttggatgtagatttacaccgatttaacctgctggtgatcaattacatcatcaatatcaggaacatctcaatcattgacaaattcaacaatttattaagtattacgttaaataagtttgtaaattcaagtgctggggtatctgactataacagcgttattaaggttaacaatactgtaaacgaagttgagagtggatgtgagtcagaagacggtgtgaggcttgatgaggctaacaaattatttaaggattttattaacagttttatagtgaagcatttttcaaattcagatgttaagagtagtaaaaacggaattgacgggtttgttaagccgaaaattacagttaattgcacagcggaaaataaaaaactgatgttttacatacactacataatcaacatactgttgaataatgactacattaacattaaagtaaatgacacaatttcaggagataggaagggtaattttgactttgattttgaggaattcgaagttgcagtaagtgaaatggatataaacataagatgtgagtacataagcatgatttttatgacgatcataaagacaattaacagtaaaaacgcaggaaataaagtcatgatgatcaataacatcataagcctccttttggaagtaatcaacgatgttaacttcaacgtagtcattaacatattaaggtacatttacagatgtgtacacagcaagtacatcaactcaacaacactgaccaatacaatccattccatcaaatcaatatatgacaactctgattctaggttcacaatcaactggaaattaaacaacagtatactactattattatcaacaattatatcatgccacacattaaatactaatggcccaattagtcctaatagttttaacgataaggatgtttctaaacttgataaccatgtgaatgggaatgatagtgtaaataaacttaacattgaccgagatgttactgatacaatactgagactgataaaaaaatataaaaacaagtatgtaatcttgtttatatattattttcatcaaataaatgttattttggaaaacaataaaaaggataattcatgtgctggtcttagttcccatgaaacacgggttgtcggttcagtgataaaatactgtattaataataaactgttgagtaatgataagttatacgttttggtatttaaatactgttatagaacacgacacaagttgctgaattatttattaaacgatgttaaggataattataacgagatgatcttttacgtcaagtttcacctaatccaaatattgttccctgatcaagtaaattatgacggtcggtgtgatatcccacctgatagcttgttaataattaatataatactgttaaaactgttgaatgattgggatatcaagataaggaatgaagtgaaggagaaaattaaaaaggcttacatacaaggtaatgaagatgaagtaataaatgaagaggtttacagttacgagtatatcatactaagtgatctgcacgaatatagtaaaactttgttttattcaatctctgaatattttattagcttctacaacacatttatcaggagtaaattgagttcaaataagggttcaatttctgatgagactaatgatttgagtgtgatatacgaagtggaagatgaagatgacggaggcctaaatataatcaaaaacatattgttaattataagaaataaagaaaagaaccaaagactaattaatgacctaataaataaactatatacctatacaagttgtaatagtttgaaaaacaccggtgaagttttgatgaatagttgtggaaatgaggattttattaatgagtttagggtaggtaacataattttatacgctttgcaacacatcagggatgatataaccggggaaataattattaatttataatttaatactcaatacctactttatgttatatataataacacacataattaagggaaggttaaataataattagatttggaagatatataataaaaaaataaaaaataatgtaataattagagaattatttatattgatgatatggaatcttgtatctatcgggtaatgtgtagagggaaattaatatttaatgttttatttgaatgctaattatattatatacattaagttcactcgcacattgctttattatttctaatattactaaaactattccattctacaggagtaatagtaggctgaatgttttcatcgatgctgatgacaacgatgagtttttcgatcacgatgaagtaattgaggagaaacctccaaaatttatgaaaaataagctaaatcatgctcaaaaactccatatcagcagaccaataaataagagtgttaaaacgagatataaattacaacaattccccaagagttagcagatgttacacatttaatctactatttttagaacaaggagttaccaaagatggagcttataagttctgctcgaatttacggatttgcggtggatcaattcgagggaggaagttatgtattcctccaatatacgtgcgaccagctatggccaaggtaacaatttcattaattttacagattttcctcattaattagatcattttgatactttatccagatatgtcacttgatccctggatataaataattttcaggttaaaataagtgtattcaactacttgaacagtttaagtatgttctcgatagataaggaaactaagtaagttcccgacacattacatcactattataataataccatataataccatttcattactttagtgtgattgacttgtactgtggcactggctccttgggattagaatcgttatcttacggcgcttcaaagtgtacttttgttgacacttccttaaaatgccttaaagtaatgattagatgtagttacttctgacaattgcctacttttctatattcattatattataggccgtgagtttgaattctgaaaaatgcaattatgaagataaatgccggcttataagatgtgattctatggtattatagccaaattaaacttatggttttaggaattgataagtagtccacacttgtacaacattaacgaaaagtttgatttaatgtttgtatcccctccttatgaagaagtggtttactccgaaatacttgaggtattttacacactaatcagcttattagtggatattaaccactgtttagtatataagtaactgtaacatattaaacaaggatgcgattgtgattgtggaataccctaaggaacttctagcccttgctcacgtaattttactcttaattaactgataatagactattaatgataagttatttggtttaaagaataaaaaatacgggagaacagttatcgcaatttacgtatataacccttcaagtaataagcagcccctaatagcaaaagccgtggaagagttttccacggatcctaaaaagaagaagagagtggctgttgaagataatgtgttagtaatgtataatacatgataatgtacttaataaaggtatcaaattaaccccaattcttcattttgttcatctgttctattataactaatgtagtacaagttatcgtcaactataatcttctcgtcaagtagaactggtttacccatattaagattgtcagactcttcagaattctcgactgcacagttggtatcctcgttggttgaattgtatttggatataatattatcaagattgttgtcgggaatgccttcactggtagtttgtgaattagtacaggtgtatgtgaatataaatgtgttatccagtgggtcgttaaatgcgatattgatttcgtcctttgaaccattcctgtcatcaattacgtctctcaatttgcttatcagtgatcgtatcttacttttgtctatatacattccattcactaagggtgttgattcaccgtcaccattagtgatgctggtttcatctttattataaggacttgaatcaccgattaaaaatgggaatgttgactgcaaattctcgattattttattaattaacccctcaattgtagtaaacaaactacttaacgatcctgtaaaatgtgatacatggtgtatattagatttaaaaatagtttctggagtagagagtacctgcagatatgaagagttccaattcatttatggtgatatcgcaagtgttggacaagataatatctcgtttgatatcgtcaatactgttgatcttcagatgccaaaccttaccatatttcttaactccaccaccaggcttaagctcatttgtcttataatcacagttgtcacaaacaaatgacattattatgcacttgtcaaacccgggtattactaaaaatttataagaaagattttttaaatgtagaataaaatgtgtaaatatgtaccaatttgacagatctggttcttccccttataaccacaatttgtgcaattaaccaaaaagaaatcatttagaccatcctcatcctccgattggtctggttcatttgaattatcaggaccatctggacaagaaggtgaatcttgttcatcaggttgcgataaataacccatttgctgtaaataataaattttaattatttatggatacctgtaattgttcattggttctttcatatttattaattgatagctccaacttgttattatcattttcaacgtaactattaccactcgggtcatcaataaacagagtaaatgactagagtaatttaatgatttattttatcacttacttggaatcccttggaatatgaaatcaatttatcctttatttcttcgagtttttgtacatattcatccaatttataaacattttcatctacttttacacttacaacgtcatttagtgatttggagaactccttgttattcaagttaacatcggttacggagttggtattatctggagtagtgttgtcaaaagaactaatatgatcagacagattattgataatgttagttaataggccttcaatggtggtaactatgccctttctatccaatttgggtatttcaaattccaactcaactaaatattatattaaacaattatagatgatgaaaatatgtaaaattgaatacattgtatgaatttggaataaatagaagttatataactaataactacgagaataatatggaaattttcattacttaatttaacggctgaggtgttggtgataacaatttgattatttaaaccctaaatcatataagaaatattaaggtgtgttacttctagattattgacatgaatattgtaggaaacgccatggttttgtaattttgcaatgtttagaatttcattgttcttattgttacagaaactgcattcaaaagacatcacgagaatatctaaatcataaaatatcacttaaaataaagtaaccattaaaatgaggtatttttgtggccaaaattctggttgtaccgttcctgcgacagctcatacatactgattctactacagcttcgccatcttttattaaatcgacatgattttcgagttcaatttcagaatcactctccattttatataaatatagtacaaaaacaaatagttttaaaatgaaccgaaaatatattatatgtggtgtgatgatcaactactgaggttacaattattatagtaaatgtaggtttgtttaccattttaaatatttctataaatgcaaattcaaatgttaaatttttaaataaaatggatgtggaatatgtaagtgataatgttaacaacaatgaagacgacgagatatgcccattatgtatggaattattggacgaaacagatcgcaatttattcccgtgtaattgcggatatcaagtttgcttatggtgtttacattatattcgcaataccatgggtaataaatgccctgcctgcaggcaagactacaacgagtcgaatttcaagtatatcaacaccaattcaaccaccacgactcgaagcgacaagaacaatagaaagaaaaaagtcgaggcgaacattaataacggagcaaacaccaataattcaaccacaactactaccaatggcgtctcagtcaataacaacacagctgataaaaattctacccaatctcccactactaatactggagttgtagatagcaataatgtatctatagaagtattaaaggatatacgtgtaatacaaaggaatttggtgtatgtggtaggcataccgctgaagttggcgaaaaaggagattttaaagagatatgaatattttggtcagtatggaaaaattcaacatattgtagtaaataagagcaatacatactcgaatgtgaatataccttcctatacagcatatatcacatactcgaagaaatctgaagcaaattacgccattcagtgtattaacaccaaacagatcgataacaagtatttaagagcttcatatggtactaccaagtactgtagttacttccttaagggtttaaaatgttttaatcaggactgctactatttacacaagttcaccaactcttccgaacactattataaacatggtaacaataataacgcttcccttaacaataaagaaacagataaagatagcactgccacggcagctaaagatgctaatgttaaggataccgcatccactaataatgctgagcaacatgaagcgggcccagttgtcgataacattttcaacgtgaatatcaagtatatactgaataaatacaacaataataataaattaataaatatcgtcaacgtaaatcacaataaatcgttaaactctgccaacaacaacgtaactaatctgtatcagtggtccttcaataatacgaatacccccaacactaagcttattggctcaggatcgaaccaacctaattactcattagaacataatacaaattcaaaggatggctcagtggatatatttaacaataacgaactgtatattaacgatataatgaataaaataagaagatatactatgctaatagataacctctcaaagtcctataacaacactactgccactttgaatcccaaggacaaatcgaatcctgttagctcctctgcaaaggaaaatccacaatctgataagggaccagaaagttcagtaagtaatgaaggaggcactattgaaaactacatacagaatatactatataactctaaaagtcctgaagttggcagtaacttaatggctgaagatgtaaacaagttgtataaatctcaactcaagaggaatgaacacctcctcaaccatttaaaattaatatttaacaatgaataatttttaaaatcagtttacacgttaatttagtagattaggcactaaaacattctcaaatacgtagtccttaacagattccaaaggccatcttttaatatctatcaaatatgataaaaatgtgttaaatcttttatcacctttcaaactctcattgctaatggaatgctgcaaaaatatgttaaacataacagtgttgatgtaatagctgttatttatcaaaagtaggagtaaaatggaccagttgactacgtcaaaggtatcattcctcattaagtcattaattacttccagaaaatagtcatcttcaaattcatacttcctcaataatatcagagatatcactgttatattattcccacttacacattttagtatacttgggtcgattatgtcaattttaaattttattgtgtagagtaatatcaggttaagtagcttcacatccgtaattttttgtagcaacatgttgatatttgttataaaagtttcattcagtactttcagatcattgtttataataaaattcatgaacctatatagtaaaattagttggtttttggtcaaatcatgttgtaacattcgattaacattatcgatcatcaagtgatgatttggacttatgttatacaagaggaggtataatactacgtcgttgctcaggtagttcaagttttctaaaaatttgtcaccaatttttatgtaattctttaaatcctcatttatataaagaatttctatggtgataacgacattgatctaaagcataaattgttagtgtaaatacgtactaagggtatgtcgtttagattcaggacgaagttgatgaatttgtggaaattttcatcgtttttgtagaactcacgatcatttacattgtaattaactaacttttgtatcaacgaattatttacaccttcatcaccgttgtacagatggttgaaggttagtaaaatgaagaaaatgattaacttaacgttgtttaggttttctaacaaggtttggttatttaaaaccaaaatataaattctttcaacaatgacgttggttttgttctttttgttaatattttgaagtaatattaacaaatgattaagattcttgatatccccatttagttcattaattaaggtgtttgttattatatttttatcgcctattgtattgtgaatgtatattagaacgtctgtaatgaccttacacatttccccattcgaactcccgttattacttatcatttttattaattccttaataattacactcataatgtgattgtttttactccccttcctgttcttacctctattgtttattataacacttattagtctgttcagataaatcaacttgatgttgtgattaatattagaagacaatgcatacactacacatttaatgcaatttatgttaaacatctttaaaataaataattagtgatttgtgcttatattttcttcaaaattctcactttttcctccccaacttcataaacaaatttgtaatgtacagtaaactagttatacttataaaatacactacattatcttgctaataataaaatgtattagtttaacaaaattagttgtctactaacatattgtattcgtccaacgttatcggagtctggttgttcaggagtctttttaagttaaatatgtgatagtttgacttaaaatgggatttatactcaccgctggtgagtaccacgttgcatttcttacacttgaatttttcgtcaccatttgaaattgatttgttccccttagatgattcaggaacagtgaagttactatccttagactccccagtgacaagttcagttttatcttgttccatattaatcatttgtaattttgtaagagtgtctggtgaggcttctgcgaatgggtttgtgttttcgaaagagttctcagaactcagatttctctgtaaattagcgttattaacgttttgcttaatgttgagtgtgaccaactgtatgtttcctgggggatccagctcgttttgaataaagttttccaagtttttgtataaatttgggaaacaaatcactgtcatactgtcattgtttttgctctcaattattatatcatcagcggactcgcctcccctttgttgtggactactactttctgaacttgcggagaaattttctgaggagtcagttaggtggttactggcattgtgattgttaatgaacgataggacttggtagtactgggaagactgaaaatttaattttaacttcattttacaccgctgaattagatttggatacttttgctgcagtgtttgcagtgccttcaagctttgtattttagttgacttattcaaggaaatgctaaaaccacttgattttagagcattctctagcattgttctactcagtgagtttcctaagaataaataagtatatctgtattatatgttgttgctgtgggtaaataagagtaatagtaccggtttgagggttgattgttatttcgtgtaaaattgttataatatcattaaaaatcgattttaacaactgttctcgctcttctttacttacttgatactctcctatagaattttgaggtttttaagagaattttcatggattaattaagtgtatatgttgacatcttggagtataatacctttatctaatatttgttttattattacatttatgtcagtggtgttgaaagcggttaacaactgtttgttatttgcaagtttacctatagagtaattaacacatctctaaagaataaacaaacctttcgatatatttgtaaatatatatggcgattgaagaacttcttcaatatcattttcgattcctgaataaaattatagaattatttaacaaaaatagtgaataataatagtttgatgagtagaagttcaccagatttccagttaaagactttatttttgtaacaggctatctcaaaacgttcgcccttgaccttaagtctcactatagctacattcgtgaagcgaacttgacatgttggctgaaataatccacacatgttaacatgaaatgaaaaaacaggttaaaatcaaatataatacagaaattaagatcaaaaacaagaaattataaataacagttaaaatatgttacaaataaataattaataaatttactatggatacaatgaaggctcggtatttatgaaaaaattgttggggacgatttataagttttctgatcttttactatttaatttatatctatttataaattttaagcatggacaataatataaatgacattacggatgaactattatgtttgccaggatacgttcggaggaatttattactgatacgtgatttagatttaaaatccacctcattattcaacgaggctaacaaattatcacagaatttatttaatgtagaaaataataaaaaggtggacgctaagacgaagaaggtggttgagaaccataaatcatctgcgattgccaacaaagcactatttgatgatatacagaatttgagaattaaggggatttactatttacaagagaaaatagacttaaacacacagattacgacaatgttaaagtatgaatatgagaatttgaagtctaagtttgaccagttatactcagatatggaactaaaaggacaattaccacatgatttaaagcttttcactaataataagggtagaacatttttgtacaataatcatttaatgactaatggaaaagaaaacgccaccgataataacgccgttgatgccttaggaattgaaaactcatttgagggggaaagcttcgatcatgaccacacccttggtgtgtttgatgaggttattagtatggcagaaagttatatggagaaggagtcggataacggcaaccctgatgatgaagaaccactcgaaaatggtactctagaaagtgtaagagaaaaggtactcagccaacttgatataacgaaaatgttcaacaatgtcgttaatcagcaggcaaataaaaaataattttttaaaattttacttttttctttatatatttagaatccgtagggtcacacaatcaccaacaatcatattttatattgtttatttttcatgtataataatgtttatttaaagtttaactttatttattaatggaaggtcatgtataatttaataataaggcgattttacacaagtattatcgccgaatgtggtaatatcacccttaaaaccatgaataatacactgataaagaatattataaaggataacaacttgttaaatggtttaaaaagtgaagaattggtaaatgtgtactatattataaataaacataaatttaatctgaataatagtttaaataaattactattaaccaaattaatttcaaccttccaagatatggataccgtaaataaactgaaactgttaaattctctttatttgaataacaatagcactttaaacataaaaaatacctttaatgtaaacaacgttaactcaattagtaagaatttgttcaacaatgattcgacaattgacacctctgtgttactggagaatttgaaaaataaaaataaccctagagagtggaggaatttagtaattgagtacataaaaacatattttttgaaccacattgaggttagttaaattaaattaattgattaatttaggaattaagcaacatcagatatctgtgtaattttatcttttacatcagttccactataaacaactttacactgtcaaattataactttttaatccaacgtttaaatgcatttctccagaattccatcaagaactactcaaataacatagttggtggagttgacgtgatcactgtcgagggcataatacaactattgtggtcactacaaaagaataacatctatcataaccaattattaaacaacataactcaaagtgtaagattatactattattatggtatatatacataaagaaatatctagatatagatttatacataaacttatgattgtttagtttgaagaaatactgaattctggactaagccatgtaacattgggtcacatatcactgtattgtaacagtttattgtactttgacaagctggacaatcacatcttagattctgtggtttcttacataaactcaaacaaactgttagataatgttaatgacagtgattttgttaaattggtaaacattgtttggtgcatctgtataaataactctaataatattgaaagccacattccaacgatatccaatttgttagaaaaggtaaattgggacaaattcaagtcactttcaagttttaaggacctaaggaaggtatttttgtttaattttcatatttgacacaattttagatgaaccaagtactcacaattgtcggagaccacttaagttctgagaattgtagactatctccattacccaatgacttaattaacttaataactcaaagttgcagtaataacatagactacaaactaaactcaaaaactcaagacaagtttagaagaattttgcaaaatttaaacataagttttaaggctgagcatgttatcaacaacgatattgtagtggatttcttactcctaaacaccactgatagtgctgaggcggttttagctgatggaggaaacgccgtttttccagataatgagctatcccaggggaacagtaatgtggtaatagaaattgatgggccatatcactataatatacttcttgatgaggaagactgtgttcacggcgacataataaagtatgggaacattaatctaagattaaatggaaagacgatttaccgaaataatatactagccaagctgggctataaactgatatccataccctggttcgtcatacaccagtacaataatgacaacgtgtacaattatattaaaaatgtactcaaacagtacaatattaattttaaaccttaaattaccttctttttacattacttatgaaatttctttatacatagagaatgttgtagtagtgcatattattgtatcgttttactaaaaagttattggagcaggggacttacgaaagttgttaagcagcgagaaattgacgttgtacaagttgttataaattaaatttatatcatcgattccaaggttaaatttgtccctgatttgcttaactaggttgttcctcttgacaatcatgggaagctcagagtatatcaacagcggtttgtcctttagtggtgcatctagtagaggaaacacctctgccatttcacaaccaaagtttacatcaactttctgcaaggaaatgagaaaacttagtttattactatgaaaacagaaggattttgaggtcctgctggatatgtatttatcctcaacttttcacttgatttgtcccagagtaaattaaaaaaagaatatatgctccaaattattatttctaatcaataaaaacagtgcatttagttgttgaaaacttacgtttattatcgtacaattcgtacaaatactttatgtattgatcacttatctaataattattagttaaactaatacaattgataaaatacattttcaattaataatttcttgacgatatcgtggtagttgaagttgatgttgtataggtcaatcatgtcctaaatcatattatgatactaaaagtacccaattgagcgcggatttcatgttatttagtgcagtttcatcaatgttgtagtaaaaattaacattttcagacaacgtcattaggtagtccttaagtatatctgtcactacgctttcactcaacaggttattattgttgttatatttaaatatgttcatcaaaactcccataaacatccctaaatcgccacctaagaggttttatacacattttgtatcaatattgaataggagtagcacctggacagaagaacgactttgaagagtttctagaatccataggggataaatgatgctcagagatgtaaacaaaatcattcgggggtatgtacatgaaattatcaattatttccttatcgacttggtcacagttgtgtgttctgacctttattttagaaggtcggctgtaatttattatttcatattattttaatataagagcaaataatggtaatataagagtaaagaagggtataaaatattgtttaaaatatatttcatagtaagaagttaccatagtgtgttagttctgtaaatcatatcttgaagggatttaatatctaaaaatccaattaattggtgtgaaaataattatgataaataattttaatactatttattacgcgatgggcagttgcaggtagctctatagagcttatcacttattttcacgtatccgctgacatcaatggtttcattcacccttcttttggtattattagtatttagactattattattagtacaatgtgtaaagtttaatattaaaaatacaaacaaaaacattatttaaaataactgaacactacatatcggaatgatagttatatatggtatattgtgtaaaaaagtagattaaacaaatcacttcttttttgcgacaccgacagtgcgtccgtgtcttccagtggttttggtatgttggccacgtgttcttagtccccagtagtgccttaaacctctgtggagtctcattttcttaagtctttcaagatcttcacgtagacatgaatctagcaagtttgacgcattatgcatatgttttccctccttgacatccttttgtctgttaaggaaccagtgaggcactttaaactctgcgggagaggatatgatagcaactagtttgttgatctcatcttgagtcaattctccagccctctttgtaatgtctacccctgcctctttgcatacaacagttgcaaaacgtcttccaacccctcttatggctgtaagtgctattactactttctcacgtccatctacgtttgtattcagaacacgcaatatatgctgaaactgatccgatgtggttacggaaattggcatcttaactaaagaattattttagtattaaaaccataaataataaagaaattataccaagtaataattatagtgttagcaaataaaataataagatatatcaaaaacgccagaaaataataaaataattttaatagtagaatgtataaatttatagagacttaccagtatatagaaggatgtataaatattatgaataagcactttttgtttgtagtgcctaagcttcaatataggggtacaagatttgtaggattttagagcttaaaatccattaacatctattaatattcagtttaattggtttcaaaataatttttatcaccaattctaactgattcgtccaattttttctattttataaaaattcaaaatatacaccttaaacctctcatacaataactgttattcaaaacatcatcaatatctagttaatttttaattgaacaagtaatatttatgtataacggggtatgtaacatattaattgaatatgagtccatcgaatttatcttggaaccatttcatggcttcttccttggttactttgtgtgattttccaacccttgttttacactttctccttttgcatactctgtaacctggccttacaagttgaacgtagaagtccattccataaattcctacaacagtatgaggattgggaatcaagaatgttaattagataattaaagttaatttagttattaaaactaaagataccggtagatggatcatatttaagtccaagatcaatgtgttcttgaattccaaatccgaaattgccggtgtcagagaagttctttttcttcagttcgtattccttaaccttaagtccacgttcaagtatgtcaagggccttttgacctcttacggtaacatggcaggcgattttttcatttcttctgacaccaagtgaacggattgtaaatctacacttggagaagacaggtttctggtctgtcagttgttccaagacttttcctgcacgggttaatctatcaccagactaaacatatttattaaatataataaattacctctccaacaccaatgtttaggacgagtttattaattctgatatctctcatgggatttggttccgtcatttttatcaatctttatcagtatcttattaactataattatttatttattggtttataataaatctttttaaagatttttataaattaaatcaaattaagatgatcagtctgtatgtaaaggcggttttatgcaaaccaaattatgaataattttatagtgttaaaaaagtaattcttgaccaataaactcaaacaatctaatttatataaatataaattaataaagactgaaaatttacaaattgtaaattaatttataaccatttacttaaccagtttacactgagccccagctggattccaatataataatcaaacaaatatttggcacattatattcaaacttctcatgaagctttattttaaaccgtttttgtatatatctatgtataataaggtgtattcttgtgggccagattattttttcttttttttccttcttgcttctcttcttttctgttgtgcttttcttttatccatcagggcgtactttttaaattccttttcaaaaaatttgtcctcaggggtcaagggcacttctggctttggcttctccggttttacccacaccttcctcctttctctcatttcatacatatgatttaacatattgtagtaccctgccagcctcgttctctcgtatctcttatacgtcctgggtattcgtgctgcatacaagctcttcaaatcctcgttatatgcctctcttaaaattttattacgcgttctcagtgctatatatattttattctcagttccatatacatattattcgtaatgatatatatactattaacaactttgtacatatattataattctggaataagtcaaaatttacctttattattcatcaggatcattttgtgtgtgtcaatgatgtgtaggttcttcagttgatttctctaaaataaatttaaatgaattcatcaatactataaaagagtccatatcgaagttgttgatgtactccttggctttttcgtaaaatatcctatagaagttatctggtgatattccttcgccttcatccctgttctccagcctctcaattatccaattcaatttatatgttacaacatctctgttcaaaactatacaaatttaatgaatcataatcattacctttatccaaagcgttactctcgtcagatgagtcactattagctgaggtggatttattgaaaaagtcccacagcatatccaaaagagacgggtgtacaccttggcggttaatctcggcatttactgccaacattacagtgctgagtggcacattatcttcaggtctcgctatctacaacaatgtaatccggtttactagtaaatatataaatcacttaccgggtacattgttgtataggtgggtaaatcttcggacccatattgataatctctagttagataatatgctaaagatatattaagaggatatatggtaattatattttaaattggacacaataattagaaagaaacctttccaacatcgaattttatccataaagaagatatcaccgtatcctggtgtgtaaaacttcattttatattcgattttataattaaaatcatccctcgttatttcatatttactattacatcaattaatacatacataactctgatatacatatatagaattaattgatactgtccgaacaatctttgaacaaacatgcgggtggtcaaggactgtgaactaaatggagcacacgggtcacttattcgaccacatagtttccaaagttcatatctttctctagggacctaatatttattggtagtgtgcataaatactagaattgagataaactgtaaatacggttaataccaatccgtatggcatatcgaaccccaaaagatcgtttttagttacaatttcttcatcaaacaatgacatataaggcttcgcttgctaaaaattgtcatttacagagtttccactatacataaatatattattactataactaggtataaaatacgtctaatattaaatctattgacaatttttgggtgtatgatggagtatctgtgactgcaattctttttcgatactccttctccaattcctcctgatcctcttgttctaaagttacttttgctcttccaaatatgtgttcctttctctgtttttccctcttagcctttgatcttgctcttagcatagctaactcagccttcgttggactactctttttagcactagctttagaggctttagcctttgttcctccttttccgggtcctttcccaccccccttcccaccagctttttgagtggatttcccacctcctttcgaagaagccttgcctcctgctttaggttttggagcagtgccttttttcgttggtttgggcttatttgcgtatagtacaaactcattgtgagataaacaaacagggttattgataaatgaatacgatttatttatgatatcttgtttataaaagattctatctgatgttccttgtttagaactactaaaaaattgttaatctctaggatttgtaaaatttagataaatgtgtaaaatcaccttattggaattctcttaaagtatgatcggttactggatattaaagtggagttaatgcgatatattaatttaaaattacagaatatgttaaaatctatcaaagaagacaacaaaataaaccaaataatacatttattgatacaatgtatcattatacagtaatatttttttatacagttacattccaaccaataaacttaaaatattaaatttacacaataaacccctaaatggctaaatttacagggtatttataatacattgtttttttactaataatttttataaattatcaggttttgtttacacacttaaactacattaacaagattcttcaagattccaagaatctaacttaatattcaaacttatactaataatacataatatatctatacatgtatctgtttgataaaaccatattgattataaattaaacgacttgcatggaagctgatgatggagttgatgttgtggatgtgtgagatctctgtctagaaagttgagaatcttctttcttagacttatccttatcgattattgcgtgtaaaattataatcaaacccatcctaatgatgaggagtgcgaatataaagaatatcgggaaattggtttcagtttcaagaagatacgtgtccagccatgtgaagcaaagcaagaagagtccatctagagagaaggcaaggcctgtgattgtgcaaatgtactcaattgggaatatgagatccacgtaaacaatgagcgttgtgacatccactgaggtgatgattgtgtgtaagagtgccacaacgtatcccaaaatcatgttctttgtaaacagcatcccaaatgccaccattgagacggcattcagaaacaaattaacgtacttcactgagtagtcgaagacaactcctagtaagaaacctgggatacatgtcagtgaaagtagaatctctgacgtgaagagcaccttgcctcttcctgaatagttctttaggagcaaatttgacatgaatatgttagtaaaattagttattgtgaagcaggagaggactaaaaggaaccttacactaattatatgacgtattgttgccttatttgccactctttttaatattgtgtcaccaacgttaatagtgtcaacggcagtatgagaatccatagcaaaactagaaatggagttggactcacatgaagatcctgttgatgcaacttttattgatcttaacctttggggtgcttcaaattctacatcactgtgttccaacaaagttacgtgatcttcgtatctatcatccagtaggacagtttcatccagttgtctacggacatgcttatgatttacgccactcgtaacaacttgttcaaggctacgggaattagataaatgctcgactgaactcatattgccttcataaggtgactcaaaggaagtatgtgttatacttgagccaccagtgtgattaagttcatgtgatctagagcttgaactgctagttcccttattaagtttactccctctagagaggccacttatagacctaccatatatagtgtaatactccttaatataataattccaagatcttaggggcattgcgaagaagccaaccaggaccagcggtattgcgctgagggacatgtatctgaagaagatgtgggatttatcagcactggtaattgtgaaggcccaattgagaagaaccggtacgaaagtgctgagatcgtctgcaaaactgattgtaaagcagattaatagtgctctgtggccccaaaagaggttcattacgtttaaggtcgccatcatcacgcacgaagctgagatggcaaaaagaataaatgctattataatcagggagtcgtgggatgcgttaaatcccaggcaaatccaggcaagaaagaaactaactcctcctcccaccatcacatatctaagtgtgaatctgtcgactatataccctgttagagctgaaactcccatgtccacgctccttgtaagaactaacagattcgccagctttaaaaactgtttattgcacttgatctgaccttctagcttagctatgaaagacttcttagggcagtgccagtggtagatccctgctctgatgagtagtcttgagagtgaggaccagttatagtagatgctggaacacattaccaccgtgacacagtacaggaaaaggaggagaaacctgttcattcccgtgtaatacttggctactgcattataatatgagcctgttcttgctacatttgtgttgttctggacattattgtgtactgtattctcatttgatgattctctactcgctgatatttcaaacttgtatgagcgccttgaaggcactgaatttaagttcgattcagtcatttcaaattaaaccttaaattaaattttaaattaaatttcaatggttgttctattttactctggattacttagaatccaatcagtttaaacactgttgtgtgtcacctgaagacaaagatgcttaaatcaaagcaatggatgtataaaaaccaaaagaatgaagggatcagtaacgtattatagttaaaaacgtataacttagtatattcgtgcatctttaaattaggtattcatttcaaaactccaaatattaaagtccaaatttaaacttaaaatcgaaatcttaaaatccaaaaaagaaaaccaaagattaagtgattaaagcgaaatgttaaaatagaaaatattaaagtaataaaaattaaagatgagaagatttacagttgagtgattagggggtgacatcgtctggaatcttcatcttatagattcccgaactaaatcctggttaagtgaacccatctagtcccattcgtgttcaattttacggaatctactctcgactcaactctcacagatcccacggcacatattagaagggaagtgtgtcgagtaatacaggacttaggaactcagtttatcttcagagaacataatccgttttggatttcggttgttctttgattttaataacgcttgctccgttttcgaaatactcagatctcgtgattgcgctggaaagaaacacagcgtcgttgttcgtccacatcctcgccccgtaaaatgacgccaacatcggatcatctgtagagtatagtcttatatcccactcctacatgttcatacacacaattattcatattcttaaatataaacacgaagttatttaattatctgaaagatgtgtattaagaacctgaggtatcattggtcttagatctttgtaaaatctttttatgaatccacggaactttgtggttcctccacaaatgaagatgttattggtaagaagcggctgtattgcgggtggacacaaagatatacttctgtacgccagctccacaatcccgcaatcattcagctttatatctatacaaatacgtaaggtttagttttgaataactgagttgaaactaagttattagaataataagttaccttgggggttaaatataatttcaggtacgctgaaccgctctgcaaacaattctacatattgagtttcatcctcgtctctttcatactcctctccattcaattcattcaattcttttaagccctctcttgcatcatcattcccatcctcgttgtttgtatcattaggggtgttagaaccggtattattttctgaaattgtactagtgggttccagttgcttaatgtcagtgatttctcctgaaacgagagcctttatcaaatcttcattattttcatttagtaacggaggtttggttttgcgatagtttgtaaaatgcttagacatcaaagttttctaaacagatttcactactatgctactatcactattaatattctatttattctgaataattaataccgatttggatgtgtaaattggtagaatgtactggtgtgagagtagatgtgttccgtatagttttattagtctctttgccgcctttaactctaaatcaaaatccaatgatacatagcacgattcttctttcatctacaaatcaatatttacataaacaacgtttagcatatataacaatagttaagtaaacagtacatgttgtactacaagttcattgaattccaaattgactgatcttatagctgtaatatttttgaggtacgagttgcactgtgaacctcctgaattagttctgagtgctgcattctggattggtactccgttaacaaacggcactgcgtgtgttgaaccaaatccacagtcaaccactaaacagcatgacaaattcatatccttaaagttgtttctttgatcatgttcttgtttgctcgtttgcgaattattaggactagaacgggaagttaaagtgacagaatcaggatatgaatacaaaacaggatcacttttagctcttgagggggtaaagttttgataaaagtatgcgctggcagtctgcgatgataaaaaacaagccaaaggaaagccgaaatcctcaaaaataatttctgctgaaagttgccttgactgtgctggacacaaattagcctcagttaaacatattgaggttgattcagggattactgataggtaatttccaggcgaaataagtccgtctttcttagtaaggtgagatcttcctatatatttatcccaaaccattctctgcctatcagggtcgtagaccaaactgttaatttgaggcctgttacagaaatactcaatcagtgtgtaacatgaatccgagacgaatcctgaggattccgacactgagtggctttgtgatcgatccttttcatctgagtttgctgaagagtgtgtttctatgtaatatgagctggccttcttctttggctggcctatacagtttggaataacatgtggcggctttctattgccggccattccaatctttacgtaacctgaaccattttccaagactactcttggcagtgttgcataggctgaagagtccatttttacgagtttctattgtacatttgatttattaaacaagtattctacaagaatttttatataaattacattacatgttattattgtacatattgaattacactaaaagtatttatttacaaattaattttatgtgtggaatttccaacaataaattatagaatctgactattgttgatttcatagttgtggtgtattaattaacatgattgtttttagattttttaataaattttactatgtcttattttatatcacctgttgctcaggaaactatcactaagcttcaatacttacttcaaaacactttatacacctacgccgtacctttacaccttccataagttatttacacattccacctacatttaacatttatctaaactgttaattccaaaaacaagtcaatttttaatttttaggaaattgtttcaactcttgatcaggaatcttccaaagaactcaatgaggagctttcgaatgttggcataaaatcgcaagttagtgaccctgactcgaatgttaccactgataagaacatggattctaaatctataaatatggaggaatttatcgcagaacgtgttgaacgtcttggggttctgaatgaccaaatccaggcacatgtagatttattacctgactcttcaatcactcgggtatgttttatcacttatttctgtgtagatttgcaattttaggaacaaatagaatctacaatttcaattcttgacaccgaatgtgtaaaaactgccaacgaacttgaacttttatacgcagaatatgataaaatttacaataaattaaaggatgccatcaatcttaaacactcctaaacaccaatcatgaatataaatcaccctgaattatacaaatatatatatttgtttttatataatattatttacgagctggttgatgatctggttaggagttggaatttgatttgagtcgactaaatttaacaggtctatcctcttaatctttgccttttcatactggagaatgttcctgttctttaccttatccttcacaactttagcgcctgtattggacataagtgagatgatgaactcgttcaggtaattgtaattgactctgtctaacttcttgaagtaataattgctaacatccttttgttcaacaacttcaaactttgtatcacgtttaaataatttcaatacttcaatgtcatggtttaggaaaataagtaaacaatatagtggtattgagtagtctggtttaacaagttttactagtgatcctcgagccaatgatttttcataaatcaactctttattactgtaaacttgtaaattgagtttactgtcaggtgactttgttactataactataaaatcatctttaggcttataaatcactttccttatgtttactgtagattccaattttaacaaattctcccttgcattagtcctgatgtttagaatatcaacttcattatttttataaacaattagactctctatgttgatcttcttaatccctccaaagtctgccttaatggtctttattagcttcataccacttgggtcgtttctataaatcgacaacaaattctcattgtttgatattactacattgttaataactttaagaccatgtatgggcaactctttgtatgttatcacttggcttgtgacccaatatccttcacttattcttgtgtatacattcaagtttccatcgagcgacgatgatataaactgtccctataataatttagttaataaaagtatcttagtatagaaacaactttgtagatgaatagctaccactaggaaataactagtgattcacatttgagtttagttgtttaattgatgtaactctgtcctggtgaatatcgttaatcgtgttattgagtacatatttatggttattaatatccattagtgttcttttacttgtagtttcactagggctggtgagggtttcattgacgaaaaactgtaacagtaacttaaacgtttcattagtaagcagttgtctcttcagagccaccaaaacatacttgtaggagatacacatctaaaaattataattttaccagaaaatgtgaatataatataactacataatatttaggttaattgggaaagggtacattttcaactgtatagtagagtccaaacttttgatcttgccttgacacgtagttaacgctgtttatattagctgttgagacctgcttgtcatcacaataatcatacacctgtataatgttatcatttactaaacagatcctgtggttatcaagcaatttcagataacagccacgactggtgttaatgagtgatgtgacagaggccacaactaccaatgatactgggtcgatgatcataacattattgttctccaacgttacagctatttgattctgagcacatgtgatgtggaatattggccctccaaggttagttacaaatttgcggtcatttatcttcaagtcccaaactaccaaaacggcctcctctcctcctgataacaggagatctttatagaagcaaagtgagtttacgttgtgtgagtgccaatggtattgtgaaatggaaacgtttttaaataaatttttattactggccttattatgatacatgctcgacaattttttaaagttaattctactgtctgtaaaggataacatattcgttgttcctgaactcttcgtgtcatctattactattattcgtcctatcaaatcacccaaaatcacactgttttcgtttaatgttattgaagttatgacatcgtgatgttcataaaaataacatttgccggaaccaggttcaaacagcacaaaatacgtcctgtttgtaattgccactcttgacaaatcactgtttgctgtaaccaaatctacattattactatctattactaataattcagtattttcaaagtggtttttactaccaaattcaacttttttgtcatcatcctgcttgttaattggatctcggtccttagaaaatactaacaattcataattcggttcaacgtgaagcagcttaatgtggtttttacgatttattattaaacagactagatttccatttctaacattaagttcatatgttaagagttttctacatttaatcttcagtttaagcaagacgggtaaaacaggatcttcgatcttttgaggtatattatagcacaataccgtaccgtctgatgatgagcacagcaacaattcgtaggtatccttgtacgtaaaagacttacatccaaccaactaaatgagcattaatattttaatctaataatatataaataaagttaaatatataagaattttataatataatgaatttaaaacttaccgaatccgggttattatgagtttgagttaatttattgccacttaatgaatcgtatagaatacatttttggttattaataacacagataatggaatttctcaggaaaataggcttttcgccaacaatataacctccagaggtatttggaatattattaaaaagtgaataatctaaatctttatggtctaatgttacatctttgggtaaatcaacttcatgagttgaatttaaaagtttaggagattctatagtacaatctgatcccattggtcttaatataaattattaagatcaattaggatttattaaacaaattgcgatggattatcatatattgcgataaattaatattaatcaacatattactaataatacataaagtgattattgtaacatccagggtgtaataattgggtaaatcaatataaagattcctaatattaataaattaattattaattataaattccaaaaatgtaaagtaaatttatttgtcaatataatttagtcttataatgttaatcaagaacatttaatttcaaatattcccttaatgataccagtaatcgaccagtttcacagtttattaaattattaacacatatgaactaatttattttattttaatactttaaacaattttgttagtcttaggaatcttgatatacctcaattgagagcattactttaatttatcacaatgtttgaattttccttaaaattttataaattcctctatttttcaggtccagctggtctagaaggagttattaattataattttattattctacccagtagcacttctttgcagtagacacattgatgaacgagtgtggcatgcggaaatgattaagcaatcttcgatttgattcagccacatttcaagcttattttaatttattatatagagaatccgaatgcgtttaattcggaaaattttcatttgagaatgtaacttgtattatatagaatcgattacatgccctgaatgtgtatataataatttcaaagtgaataattaaacccaaattcttgagtattatctattatttctaaactttttactaatttgtaaactaaattttcatcgagattttatgaataatgtgtaaaaataaagtattgacgatttaaacttgagcaatttaacattttgttcattctccgtattttcctactctaatctgtattattattgatgtttaaactgtaaaataattttagctgaaatgtgtaagcaaacattcaaatgtgagctgtataatattttcaatggaaatgtaaagtagatttgcctcctaagactctttagaaatgattaaaagggttgaaataataaatgtttttttctggtgaatatattatttgagagttgtatgtacttaaaatagcactatatacaaccaataggctatcatcaaacagttcaaggagctgagtaaaataaagtataaagggataaagaagtatgagatcggataaggtaataaagaagagtgttcatgactacgagaggaacgactccaaggaaaataatttacttgatagagccaactctagtctgctctcaaaatccaaatcaaagtatttggaggctgagaactcggggtttaagaactatgtgacaaagcaggctcttttacaaagcagaatgagttcagttgaaactgatgttccatcaactcactacagaagcttaatttctgcacgtaaaccagagcctcaattcaacgtctacaaccaacaggaaaattcagttacagcatacaattcatcacaaaccactaattttaaccctaatcacatcaccaactataatagctataacagctacaatcccaactataacaccaatttcacttctaacttcaacagcaattacactagtaacaacgaaaaggtaccagaatcatcagctcctttaaaagataactacacgggtgtatcttcaactaaatataaaccactaaagagttcaactattaagaaggaaaggccatcgattaagcctgcccaaagtgatataaaatgggatcttggggaacgttacaagtttgttgatatggtgggctctgggtcatacggccatgtttgcagggcttatgactcacagctaaacaaatttgtggcagttaaaaggattcataaggtgtttgatgacttgattgactgtaaaagaattttgagggaaattgcaattcttaataggcttgaccacccaaacgtggttaagattttggacattctagtccctgacaatttggagacatttgacgttttgtatgtagttcttgaaatcgcagcttctgatattaagcagttggtcaggtcgcctgcctttttgaatgaaaaccacattaggcttttggtgtttaatttgctttctggcgttcactaccttcactctgtcggcatataccacagggacttaaaacctgctaattgccttattaacagagattgcagtgtaaaaatctgtgactttggacttgctagaactactactttccctgaggagttcatggactccacttcttattctggaaggcaggctgaagtttcatactccagcaggcctgttgaaagtattagcactagttattcaacatcaagatcgttgcctgattacgcctgtggccttggttcttctgaaaaacttatttcagacactgcatctgggaacgctacattgaatccatacaccaacacggtcactgttaagggtccgatgagacagatttacaggagacagcttactggtcatgttgtaactaggtggtacagagctccagaactgattttacttcaagaaaattactcttttgctgttgacatttggtctgttggttgtatttttgctgaacttttaaacatgatgaaggtgaatgttagtgatccttgtgacagatctcctttgtttcctggaagttcatgtttccctctatcacctgataacaagaatgctaacccaagaaccactcgtgaaaatgatcagcttaacctaatctttaatgttctcggcactccgtctgaagaggatattaactgcattcagaaggctgacgttcgtcgttatgttaaattttttgccaaacgcagtttccaggatctgaggactaaattcaagggtgcttctctagaatctattgatttgctcaaaaagatgctaacttttaaccccgacaagcgtatttctgttttcgatgctctcaatcatccctacttcaagtctatcagcaagcctaggaacaactttgattctattcccaaagttactcttccctttaatgactgggttaacatgtctgaaagtcagcttcgatattcttttttgcgtgaaattcaaagatatcacaaggactttaagatccctgtaaagataatatatcgctcatgacatcgcactcataaactaatatactatactatatatacaaaggatagtgtaatatatattaatcagatgataatgtattatgtattcaagaaatactctaccatatgtacaaaaactatatactgtactataaatccaacgtataatgtataatgataatgtatttcaaataatatattattcaacaggtgatacggactctagttggtgatcagctattagcctatactggtgtatctcctttctgctaaaggaggacagttggtagaatgcaatctttaaaaactcgtcgtgctgtaaaacgcttttactcattttcttgcagtaaagtagcaggtcacggtctgaatccagagatagtatcttttgctcgtttagcttaaaaagtgaaaatgccaccctgaacaacaccttgtcaccttctagaaagagtgaatcccagactctgaacactgtattggtctaaaatcaaattcagaaaatactggaacctaccggcaacgatattgcaaatagacataaaaaccattctgcacaaatccacatcaaatcaatattattcctcctaataaaaaatcagttatactccattaataactactctaattaccttaagtgattatgtagctttcgcattctctttcttagtataaagtccaacaccatcacatctcttttcaaatctaacattccgtccttataatatcctaatccgaaattgacatgaatatcaatgtaacacagccatatacaatagtttagtttatctgatatcttctattaatacctgtaaggtcaaatcctttttcgtgtatgcgactgtttacaatttgtactagtgaccaaaaagcctcctcttcattcataaatatcagcaatgttgcggttaagtagtttaagctctaaaagaattaaaacttggagaaagtacctggcaataacttattgatggcatgtagttagcaaatgcacacagaacatttctcaacatcattgttccaaacgagttaaccttgtagtctctgtggtgaggaaacgttctgttaatgtccatatctatctggtctgatatgtcctttgagagtggcgaatcgaccatcctgtatcaatcattatttctgcataatcgaattataactatgctattaattatttatattttaacttttgatatagtcctgggttagagctttccagggtgtctgctcccagcattttcctccacaatagcgatctaaaataataaatttactttattttagtaccttaaatgatctggtattccctttctaacaagaattttaaattcatctgatgttacgtcataaaatccgtcatttaatggtatactttcccatctaaaaatacatacactcaatcaattataaatgccataccttttgaggcggcgctcctttttcacttcaaattccttttcatatgcttcaattcctgaagcaaactgattatcatctaatgcgaagccatagctgtcatatttcgacttgagaggcccgaagttatcatcgagaaacggaatgttaaaagaattcctgttttttaaccgctttgacaggctaaataggtgataacttgctctcttaaataatggcttctttggtctttcaactccatgatattccatggtaaaattcataaatttttaaaatttgtgaaactgtaaattagactccgggtgttaaaatggaattaactatttatattacaaatatcaaacataatttaaatttttaaaaaaataatcctgtgttaaaatacaaattctctggtaagcgatgaaaaaatattattgaaattccaaatagaagaatccacttaaaaatattttaggattcaaaattaacatattaaaagtatccaaaaaatttgaaatgaaaataatagactttggataatttaaaatacattagattataagttttataactttgtggattccaacactccaagcagaggcagtgccaaccatatacaaaataaactattgtttcatatcaaacttttaaaaaatattaaaacagttgtggaatcttttcttaaagatttcaagggttaaaatggtcataatgtgatatatgtaggcgatccctgtctccgtagttccaccaaatataagggagactccatccagaatacttcgagtcatattctctaatacacgaattattaacttattcacattttttacacatatatagtctaattactatagtaactagatcaatacctcctatcttttagtgcataatatctcgccattctaaggaatgtaaatcttgttcgtttgcacttcattcttccccattggtagtagttgataatagaaaccttgtatccaaacgcctttatcaattttgtcagcagtttactgttcgccgtcatgttaaacgttgttgcgtagaacctgtggtatgaattacacagccataccaagttctggtcagactccaaaatatccaacaaaactccgtttttatacacattggtctcacacctgatcctcatcctcctcaaatgttctgacacctgataaaatcgatatttatatttagtttactttgtctgtgaatattgaactcttaaatctctttgtctcattatatttcaacagtatttccattatccttgccctagctctttctacacaacattgtaagttaattaaacatgtaccaggaagtgaattgtataaatctttgtgtaaacacttcatataagatacggcaacagtaaaagtcctataatcaatataaaacaccagaaaatgaataaaacggtacctaagtgagttcaagctcagggtttcttcattttccagccttgaaattctataaataatcttattaaatagtttattgaggtaaaaatacgttgataatgccgataaaacaagtttcaagtcatcagcagttggtctttcaagcaagagattagagtatgctactgttattaaactttcaaccttcaattttggatcgaaattattaatggtttcacctgtcttaacgaacttcgactcaagctttgattttatatctggagaaagatactccaagtttgccagacttgagtataatgatactgcagaactaggatccaaatcacctaaatcttgttcctaacaatatatataagctaaattaaatgtattaattaccaataatctgttataaatggatttaacaatttcaggctcgttatatctctgaatagaaaaagataaaagtaccaaaacaatctcatcccagtcaagttctataaaatcattactattttataatagtattgtttaaacatatggagaaactactattaacttaaaaataaaaatactttgaatatgctttgaatagtatttagaaatagtgagaaataatggatcgtataaaatcttcagtttattatatattttacaaatctctataaaaagataaaatgtgaaaggaataaaaataccaagaacttttttcttgtgttgaaataattcagtttctgttgatttttccaatagtttacagagtaatttatttagattgactgaaagtggcgaaatcaaatccaactcagtcacgccaagcttgtcacagagctaaaaagttatgattaataaaccaaaaaacctctaaaattgttaaatatgagtcaatatttagttttttttcttttaatgagtttttattattagtgatatgtgtgccagttgtttgtgtgttttcatcagatttttcgagggtgaatatttgattaaaaactttagtatcgtaattcgaagagataaaactcctcaaaatgtttgtaatacgagtggaatccactgaagaactgagattttcggaaacatttgtagtcgtatcgtggtagaatataacattacaagtgtgtatagaagatttcaacggattccaaaaattaatatagaaaattctctcatttttaagtatataacgattaaaaaaatcttttcctaaatttattaacatttaaattaatagtatctcatctacacaacactataataactaagaatatcaggtttattatacaccgattatagtactataattcgataaatagagtaaatttaaaaagtaagaagaatgatagtgtataatggaatatagtgaatatactgttaaagtaaagatgtactattatagaaaccaattttgaagtttcggttgaaaactcaaagaataatgtttataatcaataaatcaggaaaattattgaaaactggtttacataatgattatttccaggcctgattatattaagttatatggggaatcatcaactggtagaaagacagtgtaaacaattagcatattgatataaacagcaagatgcaggtcacttatgactttgacgatatgatgttacttcctcgggaatgtacagtactaagtcgggcagattgtgacgtttcagcaaagctggggaaatttaccttcaaaattcccttaatggcctcaaatatgcccacgataatgaacgagacgatcgcaattgagcttgcgaagaggaattacttctatgtgatgcacaggtttgggattaacacctttgagttcgcccataaaatgcgcagcttgggactctatgtatcaattgcagttggtgtcaaggaggagtcttacaaagttgttagcgaccttaaggagagtaatttagtccctgaatttatcaccatcgacatttcccacggacataaccctagggttaagggtatgatcgaacacatccgtgccaatttcggcaatgaaacgttcgtcatcgccgggaacgtcacaacccctcagggtattaaggatatggaggactggggtgccgatgccattaaggtaggcttgggtcccgggcatgcctgcacaacttctcccagaaccgggttcggatctaggggctggcaactttctgctgtggctgaatgtgcaaaatatgccactagggctgtagtaatttgcgacggaggcgtatcaaaatcaggcgatatcgcaaaggctatccatatgggagccgactggataatgtccgggtacctcttctcagggaccattgaagcccctggtgaagtcgttgttaaggacggagttaaatacaagccctactacgggagctcgagcgtagttgccaagaaggttaaccacagaatcgagggtctagagcttctcgtcccttgcgaaaattcacttttcgagagactcagagaaatcgaggaggatttgcagtcgtcagtttcatttgcaggcggtaacaaactcaaagatctcagaaatgtcgaccatgttctcatcaactcccgcccccaaaatcctcataattaagaaattatgaatttaaacagttgtaatctttcctttttatttatttttgttatatattaccttgatatgttattctttaattatttgaaaagttctgtgttaaacgttacacataacattatttttcataaattcatgggttaaaaggtagtatttatctcagataaatagtatacaaattgattgtctagaatgcaaattttagcagggaaaatcaggtaaattacattggaaggaaataatttatcataataaatcagtaagaaaagtaaagaattttttttaattaaatatttaggtgaaataagtttaaaagaattgaaaatatatggttagtgtggaattaaatgaaaattgttcatagtctatgatacagttgttatcatactgttttttggtataatgtagggtgtggattctatattctaaccataataccattgacctagtttaatcgcttttttattaaatttaatgtacatcgggattttatttaattcggttaattttacctcgtccgattaacttttagaattttaaactattatcacggatcatactttaaattaacacagattctatttaatcatcttgttcagcttatttgcagtatttttcaaccgattttcgtttaatttactaaaatatttaaataaagaagtgtatgaactgtttatttgaagatgtcgacggaaccagttgaaaccgagcttaacaataagcacgaatcacatttggatgaaaatgatttgtcaaattcagacattgtcaccaaatatcgcactgcctcaaatatagctaacgctgctctaaagaatgttctagcagctgttaagccaggtataattctcttcatagttatttacacctcttatattaacaaaaatctttatctacaactgattaggagtgtctgtgaaatctttgtgtgaagtgggagatgccactatgttggaggagaccaacaagttgtacaataagaaggaacatggcagaaaggtattttcaacagtttccaaatattgattaggttgataaaggagttgcatttcccacttgtgtttcagttaacgagttaattgactacttttcacccatggacgactcactaaccgtcaaggagggtgatgttgttaaagtgtaagttcatttcatagatacaataaatcggatttaactagttgtacaattgtttaataatattgtagcactttggggtgtcatattgatggttatgttggactggtttcacatactgtttatgttggtgaaacagtcaaggggagggctgccgatgtccttaaggcggcttggttgtgctgcgaggcagcacttaggaagcttaagaccggtgtttcaagccacgaagtgtcaaaggtgatagaaaaggttgccgctgagtttaactgtactcccctgattggcttttacagccacgagcttaagaggcacgtggtggaaggagctaggtacttttcaggaagcaccaagcttgaggataagactgagcccataacattcgggactaaggaagcctactccttgaacgtagtgttgactacgggagaccacaagcctaaaaccacggaacttcccactactgtgtacagaactgacgtccagaacaggtatacactcaaaacttcactgggaaggtccttcatgtcccaagtcaactccaagttccctgccttccccttccacctcaagtcatttgaggatgaaagggcactcaaggtaggacttcaggagtcactgaggcataacctcctgaagccatactttgtaacctccgttaagcccggagatgttgtggctcacttcaggttcacagtactcttgttaccaaccggaactaagaagatttccggcctacccttcgaacaacttgataagtgcaactcagaactttcagttaaggatcaagacctactcacgctcctatcagtaccttattatcccatttatccttagattactgttaattagtggtttaataatgaatgtaacaggctccggtgaatcctaagaagaaaaaggcaactaaggaggaggaatcatcttgattcaatttaacgattttagtcactataatgttgtcattctagaaacattatattctattaatattattatgttaaattattaaaataataataaaatgacagacaaatgaacgagattgggtccttttggtttataatgtcaaatatttaaaccttgttgggtgctgatgtgtaagtgccaagtgtcataacgtaagtgaaatcgtcatgttcctcaacatcgagttcctaagagtatgttttttgtgttttttgtcagtaatttacctggtacaaagataattctatctaaaaagtgatttataaatgaaaattacgtaactctgaccgaaaccaatttaaacatttacacatttatcccaaattgataaatgttattctaaatgagtctgaataactctagacctggaattaacacccaaactcatcatatctcacaagtaacttattttatcccttttttactaacgttaattattaattaacagttagttttttctaaataacagtattttttatttaatcaggtaaatattactaaaataatagtatcttaactatatttttgtcaatgtgtaagataatgataaaattagggaaggagtgtaagggtaagtgagccaagtgagcgagtaacaaatagaagaatggcaactcaagttattgaaatgaacagtcgaggttatcccacggatagggttaattttgaatcaggagagactactcatacctcagtggaaccagttgatcttaacagtaaccgaacaaccttatcgcccagaagttatgaccctgaaaataactcagtgactgttagggagtcagacttcatccagcagctcaatttacaccgtatgacccaattacaagccggaaacagagttcaaaactctagagtttggagtaaacttgggataaaacaccctagagtctatggaaaacttttcagaatcttggccttacttctgttgtttatactcataggaactgccacttactggctactcgttttggtggtggagttaactgataaaaaactatcacccagtttgattacttctaacaaaaaatctaaaaattacggaggaaataatggcttaacaggagtgaataatcagactgagttgaatgccgtggaattaatgaatgtgattgaggagcttaggaaagaaatccaaaagttgaaggaggtgtcgtataagaattctctggccataaacggtttatccaatggtgagtacaaggtgccgggatctgaggagagccttgagtcagcaaaacgtaccaagttcggaaagggatcagccgccgttaacatgaactcttatggacacaggcaagatatgaagtttgccaagaaaagggatgaagactctgaattcgtaccagacattatagaataccaggcaaacatatcacaacaatcttgaaatctatcataatctatttttttataaagaattttatatttttaatgtattttacgttttagtattttatttagtaaaatgaagttaatttttaaaattgataaatttgtaatattgtaaaaaatgtcgtctgattccgacgggtttgatttacacatccaggccctggaggaatggtataaaaatttgagtagtgaatcaaaaagcgatctttcacttatcaaatacaaagttccttatatttaataataatttactcgttaatatatgaatgtgtaggatttaccgaaggataaggagaaatattataaaaccatagaatcctataaagaaaagtgtttagctctttgtttagttggaaacgtgtcattcattaattcagtaatagactcccccttgtttaaagtaccttttaattcgaattcttgattgatttactaattatatattaagaataataatgaattagggtttatgcatatcgtttttcgataagtattacaaggataagtacgagcctcttctaatatttaaatttctaatttctaagttaaaggtttgtagtaacccattgacttctattaacatgttgacttagccaacagttgaacattcttacattaaaattactcctctcaagaaaggtgaatactattttaaacttttaaggtattattaaaacacaatttatttttttagagcctttcaaacgtttaaggcccactttgatctcatgacaatggtactttaaaatcttataatatatgccagattttcgtctgtatatgccgtaataatggaatttgttcgagaatcgtttgcaaatatccctcaaatttcaacctacgtactaataaaaattaataatgatgtttagaatttataaagaataaagtaaattttatcgcatattgattgatacagggagtttggtgtgagttttttgacacaaaggaaagattctggaagtatgtagatttttcagggccaaaattcgatatctcaacttattcatactctgattcacccaaatcagaggacaaatcggacctaaatagggcaactaagaaacttagaactgaaaatgtaaatagaaattctaacggagtatcaaaagatcgtgagatatcttttgaaaataactctgaaacatcttataagggttatttatacattcaaaggggtagaaagatgttcatatataacatgaataacaagttggaggtcaaggccattgtggtgttcccaagctataactataaaatcagcagaatgttacgtgtaaaggactttccatttgaacttgttaacgcagcccactcactcaaagtttccatcataaataataaaaattatggtactatcggactcaataaaaatttattcattttaagttgtaacatatgtggaatagtgtcggagataacaccaaaatacgtccaagagtattttttaccataaattatatttaatatgtaagtaagttaataatctttgtattaggtgtctgttatatcagaggagaagctctttcatcgaatggtttgacgaatttctgttaagtttaaaccagaggagaatacgccgtctcacaagttcatttgataaatctgggttcgactcttttaatttggctgaaagacttgacattcacgtaatcaacgcaaatatgttggaaagggttgatgccaagcttataaatattttgaagaaaacatatcccatcccaagatcaaaggtccatttcactaaccaccccatttatgtacttaaatcacaggtaaccatatctaacctcttattaataatttagataaagaaaaactttattcttaaggagaatagtgttcctataaccagttttggggatgactcagtatatctaaaagagaatttggtagaaattaagacgaaactgggctggcacaaggaaaacagaagagttatttcgggctcaaatccagttcacacaacacattcaagacatgtatttacttttgttattgaatataattgttttagaaagtttccgagtattacagtattgatcagactgaagagttaaaacaggaacacattgaccaaatagacagatttactatcaacttaactggaaacgtataatagttaaaatttatacctatacaatattgtttagaggcacgtacctgagaacagtgtgtatataaagagcgagtattacgagaatttggagaacatttgtaagaggaacaagatattttttaagagggctttctcctcatttcattacgaagatgggtctgtgaaggccaaaatcaacggagtgttgattagagcaagtgacctccagtcatttttaaagctgtacgatggtatcttaattgattcattagttatgtgtagagtacatagaatcgatttccgagaatgagttgtatgaggagctagaaaatagccgtaaattttggaaaaacgtattcaaaacacttttaaacacacctccagtaaataaacccaaaactcacagagatttaagaactaaaatcaactccgagactgataagtttttaaatcaactaaactagttgccctgtacaccatccgcgttatacacatttattataacatgactatgttatattatataatatataaaagtatgtaatatgtgtgatattgtaataatattgtgcgaaatgatgataagaccagaattgtgtaaaaatcaatggggaggaataattgtggtgttctccccatcagatatagggataattatcctcagttggaattcatccaaataacaactaaaataccaactagttgatagtgatgatgaagtttgttacattggctttcgtagctgctctgacttctggtatctatgtatcagcagctgaattagacttgaggaaattgggatttgtcctatacggtaaacacggtgaaggtgataaaaccgcagttgaagtcggtgtatgtcctcttggtgatcttcctgataccgttttcctccataaaactttcaagaagggagacaatttcttcacttgggtcagaccagttcataacaaggtaactaaagttgtatctggaagtcacctggtatgggaggcagcagcatccacaaaggaagtgctcttggacctgcactttttcggtaaaccagctggtaagaagtttgtacacctagaacttctacaccacttgggaggtgcagttcatgtattccttttattcgatggcaccgccgctgcaaaggtgcttagcatggctgcctttgtagctggtgtgcacgccttagttccaggacttcacgaacttgaaggtgttccagcacatcatctcgtaagcgcattagcacttcatgcagctgcctaaaccaaagattatgtttaggagctaatatttaaataaatcgttaagtattaaacaaccaggacttttgtttaatactgtgtaaaaacacatcaatttagtcctatcactacactaatacacattatatatagaataatccatacattgtatattaagcattaaaatgtgttggtgaaagataaaagcgacagtacaattaaaagagcctcttctgttcttatggttcttgatttctgctgattacaaaagttgaaatatttatcaaatttcttttcaggttcttgcattacgtgttccaaacccaagactgggccgaagtatattaacatatttctaataaaatattatggttgttttatagagatttaattaatgggtaataattagataatacttgaatttgggaagtttggtatttaaggagtataattctccacgctcactggtaccaactttaagatcgtaacgagcattttcattaaatgggcatccttttaatgactcaaccacagtgttgcattccctaacaatatatccccaatacaaccctaagaaaccaattattttacctatcatttaataataactaatggataaataaatggattttgtggaaagtacctgcaactttaagaggttcttcaggatgtaccagatacgcagaaagtgaaccagtttcactctgacttaaggattttccctctttccagtttttatggcacttatcaatagattcatcgtctagacgtacggtgactctttggtaaacatcgtaatcctcatctgtcatgtattcgattccgtaaaactcctttaaatcctccttgttgtggattttaacacttgaaaatactccacaatcagcgtacaaagttgtgttagtactatctttccttattagtccaacaactccctcccttaaaattacatattcagggttagagatacctgtatggaagccactcagtagagcgtagatggtgaggagcattaatagggttttgtaacccagcgaattttaaagctaaaaaagcattattagtatagaaatatgtgtatataaatacatgaatgtgtaaaataccgttatccatgggaaacaaaaactttctgaggtattgaggtgtctccaaatacctcaaatttagagaaaaatactccatccagtttgaactcttatcatctaacaattataatagtttgtaattatacctagatcattgtatagaacaacctcattaactccgtaaatggtcagtgtcctggcaatattgcctatcacgtatgccctcaaatcatcggactatattaagatatatcaccgtatactaaaggttttatagaatgttatgagtataaccaacttgtatgttttccattatagaaactgggagtgctactgaaatagtgtaatctcttggttttccaaggaacggaatcctctaagtgatgaatgagtgaaataataaataaatacctgaggaatctccttaaacagcctaacatagttcaaattatacttattagtatcctttttaggccttttattttccttcaaaaccttgttgtcagtaacattatctaaattcttgttcgatagttcaacgtgtatgttacctaaaaacatggcaattcaacaaatcagtttaagttaattcaaaatatgtaaaaatacttttatgctttttccgtttcttttcaggcctaggagtgtttgttttaatgtttataaaggtagaatcctgctcatcatccatattttagataattaaactaaactaaattacacacaaatcattaaaatgctgatggaacaaaaataaaacataaatcttctttaacataattatgtatagtaaatgttacaacaattattgagattccccaatctttaaaattggttcttcaatttattgaaaataagttaacaatttgccaaaagcttagtaaaataatataaaataatacgatggattataaagagaatgtgtaggattaaactggatacaatgtgtaacacaattggtctgtggagagtgaaggaccagccgctccaactgtagtcgttaatgaatcactattactttgattgtgttgaatattaccaactgtattggacaggggattagaatgggaaggagctggtaccactacctgaggtattccccagtgaggatgtattgcacctccatatataaacaacctcctaaaatcaatttatcagcattattttataatttatagagtgtaaaatgtgaaatggtaatacctgtaccaaaatggtcttagtttattccttggcaacattctctttatagccaaattcagctacataaagcattaacacactgtaaaatatgttaaattaataatctttataaataatagttatttcgtactatcattcctggattatttgccataatggtctttgcagttattattttaggcccctttggatgtgctgtatcacattaatttaacacaattactagtaaaataataccttttctgtcaaacttgtatactttagtatcccacgagtgaccattcattgttacatgaattgcgtttactatgatgacgttgtcccctgtgactttgtttggctgataagtgggcagatgtttcccttgcaatattacagctacatgagatgcgatgcttccaacagtctacacattacattactcaaatataaaaaacacagttaactactgttaataagtattctgatactttatttgaggcgtcaatgatgtgccaattccctgcggttgtgtccatgtgtgtgatagctcccaggctttggtgcggggttgccagaggtgacacagttggaagattctttttcaggaaaggccgtgaaacccttaaaaaattaatccaaaaattaaaaataaataaaataactatatgagttaattaatggattaaaattggtgttattggagaatctgagtaaaacttgaataataacataccattggacttttgagaatggattcacattcccttcatgaaatgaggacctaagtgaccttgctaataaagattttgatataaacattaaataacatacaaaatttacaaatattattatattatttaacaccacttatcacacattaaataatgtggactaggttaataaattataatttaaggtatttaactccatttgtaatatcataacatcctctagaatttgtttctgcattcttctttctaacttcctacaaaaatcgattaaaagttgaaatggttttgaacaactattataacaatgactaatttgcagagaattactttcagcatttctttattatttcttttaacttcttttattagagcctttgttctttttactgctaactttctctcacgtttttcctctaaactttctccctttactctagtcgtgttcacctatcataaatgttaaacaagtacaaatggtctatgataaataactggtttataaaatacttctgggagctgtattgtatcaatatccaactttttatgcgtgctgtaaaattgatgaattaatcggtaaaagtgtggatatacctgttatcctttactggagttggatttggaaccttaattttccttgaaagtatcatcttcggatgatttgttgagttcgaatatgtcgtcaaaacagtctcaacatccctaataatgttatgattagataaataggaattattgtaccattgatcagattcagatgattcatattcaagttcatcatctaaatcggattcttctgacaggtcattaaattgttcattattctccagaatttcatatattttatcctttggtactaaatatcaaatttgaataggattttgaaaatacttattggatcgagaattgtcattttatctttatctaaagcgttgtagtggttaaaatccttcatataccctctttccaaaggattttcaaccatatcatcatcatcctcattgtcgtcctccattaagtcagagttattaatcttattatcaagtattgaggttggtatcatcggagtataatttccccaaagtaaatcatcctcatctaaatcctcgtcacagccaattgcttgtgatacgaaatcgtcatctatggcctcaagctcattatcgctttctaaagcctcaagcacttcatcaactaaacaattcaataactcacttaatactaataacactataaataagtatagtgaacgggttaaaaataccttcagggtcgagtttcttttctaagctagtggttagatcagggaaatcagctccgctctcaacatacggttcatctggacaggattatgactaaaaatcttaccagtcgtaagcttgggggctggaatgaaatatttcggattaattgtggcgaggtgttgttcgtaatcgtacccatccttgggaaagtagcagtcaccttcaaggtcatcctcagtcacgttctaaataataatacaccgtgtattatagtgttaaattttgtaaatataaaacaactcacttgtttagtctgtttttttgtcggtttgtcgaatttcttaaaagtatcaaaatttccataaatgttctttattaacatttgctaaaatgttaaaatgttagtggaagatgatagattttaatgaattaaattagaaatagcttaccttttgcgatttatttaaattatcatgaattccgaagtcatgagggtctaaattcttgagaaggtcctttggcacctgagctgagctacggttctaagaattttattttgaatctttaaaaaataccttccaaatatcattttggctttcttttagtactaaagtcctttgccatggtaatttatctgatcggttatccgcatttgatgcggaaaccagctggaatgtaacagatttcttttccttaaccatatatttatttaaaaattataaaaaatttaaaaatgcgataaaactattctataaaataaaaacttattgaaattaaaatatattaaacaattcgttgtaaaaatcatacactacaaataacatgtaaaatgattaaaaattaatccaaaaaattttctagtgattttaaattgtcaaactgatcaaggtaatctctcaactaaaaaattatgaaagtgtattataatataaataaatagttgataatacgttttgaataaagaggtatatggaatccgtccagatatctctacttctttcaacagttttaaagatgatatcacgaggaccatctttggtgtgatattttacgtaaaaggatgagtaatcggtagggtgtttgagtattgtgcttatgcttaggatgtatattgagccttgagggttccttttcgctctgcactcaggtttacagctccaataactccagtaccactttcctatacaaaattctgtaataatttccaaaataccatcttttagataagttttatagtaacgcatttgtgatacataatcttcctttgcgattaaatgtccctccaatgcgtatgataataacgccaacttctcagccagtaacattatctgcggatttgttgcctaaactcattcttatccataattgtaaatatacgttaattttaacttcaattcccgactcgttatagtcatttatacacatatacgcctgctgtaatactatattgtcaatcacattaagcccatccgatactaaactcatgttgtaacttagtaaattaaaactttatatataacataaaaagttgggaaataaaatgtcatatgttacctttgtaaaaagagagtttaatttggtcttttttagaaggatcatcagtaagtggatacctaataggaaatgcacgatggtttaaaaagtaccacttatccttggggaatttagcgtctataatatccctgtcaatgttaagggtaatgtcggctacaaccgtgtttccaaccaagcctttcttgtagactttgagtctaagctcattgtcgcacatccgaaccttaaccagtgctctgcactgcaaattcgacaacttcctaccccgggataatggaatcgctaatcacattaatcaccatttaaagttacctcctgctgttacttttgtatccccaacctcaaactcgataagtgaatgcttctttacaaagtcggcatcgatatcagttatattgataaggagattaaactccctgtggttgtgtatcccagtataataacagaacgaagctgaacaatttatacaagttataaatcaaatattatataaaataaaccagtttatttaactatatagaatcaatatgatacctattggttcataatctgagggagttggtatagccttgtaaactctgcgtccacattccataaaacataattccgcactcctggaacaggcgtttcgcagtgcctttgcgatcaaacccttagttagcattttataaatcaaaatattagcttatatacacatgaaagtccatacttttaaaaactgcaaattataacacattttatcactattttacaataataaactgttttaaagctgattaaaattttttaaagattttaaaaattacaaataaatttacagaatgtgataatgtgggacagtgtgtattaatctacacatttacaaatttattaatctactcatcattcaccagaataaattaaaataaataattaaaatttttaacctaatttataaatctaccacaaatagcaattgtaataaattaatagagtctgtccacagaatctaggatggatttatgtaaggataccagaaaggtgatatagtttggttcttccccgagttcatcctcgagcagtaatgtttttattatcttgctgttttttgaggtatatgggatgattttaagcggggcgtaagggcaccccttgtgctgtgatcttacgtgttccacaagccccaataggtttgctgacgtattcgtatctattagttcagttgagtttacatttccatgagggaactggtaatctggcccgaacaattccttcaacagtatctgcttaacatgaggtccgacaaagagtaaaagcctgtaaccatcgtccatcaggtaaatgccgtcactgtaaatgaacgaacctgagcttgggactccagataatgtgaacttaaagccttgctctggcactgcatcacccttctcattaatgctcctatgcaaacaatatgtcctcgtgtacatgaaaaatgtcatttgtggagaggcgctaagtatcctcaacaacttcatcacaaactcaaatgcgaactccactccaaattctacctttacatcatacttcaagaacgagttaagatatgctggtatgaacttgaggttgtctggcagaatgagctggtttttaggtgtcgatggtgcacaaatctgcctatatgaggtcagagactcaaccagagtccttatgtgttcatctctattatatttgcctgattttatgtatccgtgagcaagctttcttgacatcaagttcatgatagcttctgggtttgcattcttaaaaatctcatttatgcttgcaataactcttatgcagtgtgtgtgtactcttaccatatgtacccctttagtgttagtgtacaagcaggcgcactggatgtatagacttgtcttgttgtctaccatgtggtttagtgagagcataaagcctattgacaagtcaggtccaatccttggaactaccatagtcgagaggttagaaactgccctcgagttgttgaacccacacaaaagctcggtgaccttaatatgcttcgagcacctaagcttaaactcgcatttgtaggctgctgggactgtgaacagcctcacaacatctgcgtaaatcttagggtagtcaaagatgtgtgagaacctgggcatatatgcgcagtttcctccagtctgctgtgatatgtactgtagtgctatgtcgccggggatcctggtctccggtggacacagatacacgtcaacgcaaatcccggctgagtaacacatccgtagaagcgagtcatagaaatatctttgtaaatcggtgagtgtgaaattcgactttggaaaagtctgtggatcagttccaagtccaatatctggctgcgtaacgtagtaaatcgacaatgttccgtaacagttatcgctgctcattgctcttagcacgcagttcagtgcaaagtttgcgcacgagtttggtgctattctgagcgtttgaatgcctaaaatcttctccaaatactccttgacccaatctcttgtatccttagtcactcttacacatacgtcggatattgtgcatggcttaaaattctcttccacctcagccaccacgttaactgaaaattcggacccggatcccatggggaacatgtaaaacgcgctgtcgaatacgaaaatacacaaatcaaactcttcatctgttatcaaatctaacccattcatcactgatcttatcacagattctctcaaatctaaacaaatatatattattatatatggttaagtatttggtagtacagctatatatactagtgtaactataatataaatgactaatgtggtacttagtttattggcttgtgatgtagactcaattaagaaagcgtatgttggaaatttattttcagttttctggtcattttgtgaagaagttgcctcatccggaccatcggatactttaaaacttggtgattcattttcatcagagttgtaaggctgttgatatagactagaggtgtaagaatcgagttcagaagcgccttctattggtattggtgaaactgaatatgtgtcgtaaatgaacgattcctgcctcggttgttgggttttgaatactccaatgttagtagccctattaataaggtttgatatacccccagggtcaggctccttattatagtaatgagatggtgccacaaagtctaagctaccttttttaagaggtgattcctctctgtactgagagtttatcctgtagagagcctccagctgttcgtctgttatctcgaatgctgtgtagcacaggttacaaactctagtcttagttcttgacctagtgtgcatatatgaattgtagtaggccaggcagtttctacaccttatcaggtccctcttgacgtttgagcgtttttccataaatgccagaaagtccagttcaggaactttctggtcctgattctgagcaaatggttgcaccaaaactccaaatggaagcctcaagtcagacaaagtgctcccgaaaactgggagctgagtgaaggtgggcgtcacataaataggacttgccgagcctgtgtccagtatcctgtggtttccgaaggttggaattaggccatagttcttatcagtctcgtaaagtatctcagactcgcggttgtatgacagcggttgagggcgtggaacactgctctgggtaatacgagtcggcataaagggggcataagtgaacacgtgacgctccagttcagagtcaacgtagtttttacccaaaatgtcccctaaaatcgacgaactcgtgtccgatgtcaacgattccaaactcaggtctttaccaaattcttcaggcggtcgcatactagctgatgttacagatttaccctgcagatcatcgctaggtacaaaattagtctgcaaatgactactagttacagaattagtttgtatattagcagtggtttcagcaacattctgttgaaatgttgggggcggtgtactaattaacttgttcctagtaggtataggagggttgtgagtaacctgtgacaaccttggcggaggtgaaggatgaccgcgggattgaacgttgggaatattagagttagtagtgggtggatttagagtagtggctcttgaaaagtgatgagtatctattgtaggggcgtcagatgtatttccctgattgacttcattttgcgatggttgattactacgccttggtaaaaacacatttggcctttgtactggctggtttgagtccatattaggcttgaagtataattaaactgctttaattagaaaaataaatccaaactagcattaaacattttttaaataaccaacatttaaaataattttaaaatcattatgttaaatttcaacaaattcagtttaaaaccatgataaaatgagtgttaatttaataaaatttggtagaaaaattttctataattattaaaaataatattaatggtttaaaatagttaaaaataaaaaatccagaaaaggtaaaaatattttacatcatatagaaatatttataacataagttatcacaaaatattttaaaatacataataaacaaaaaggtgtagtataaataaaaaatgaatatataaaaaataaggtattgtgcagtcaaggataggaatagtgatgtaacattacggaattatttttttattgtcttaattttgttccttcttttttgtttagttttgtaaatattattttaaattaaattattatttattttgggccattcattcccaaatgtgtaccatatttttgtgttctcaacccttaaattatttgtaaatgaccacagcttcggaggacttgaaattgaaccctttgtgggtttacaggttctcaaactacaccaatgaatcttccggagtttctgccgacgaactcctcaagacttggaacattcatcctcatcttaggaatgtcattaaggaaaagaggataaaacggttttttccaggtaattgaccactaaagtggttatatttaccttagttcaggagaaatctatccctctattgctaaacaacacttatagagataaatattcagttttatcctgtgactttattataacagctccaacaggtattatactaagattttagtttaatcttataggacaagggaaaacgctctcatatgcattaccattacttaacaatatcttaaatctcaaaggtagtttatttccactacctttaacatatttttattaaactaagtcataattgttgatagagaacaaattactgactcttattattgtaccaagtagagaactggtaaagcaaatttatgaagttttttcatggttcatcgattccagcaattctacgtatgatcttaaaggctccctcctaaaggttatatattaattggagtatatttttgataggctagagtgttttatggagatcgctcttttgtaaagtcccatgatttgttggttcatgaccctccacatatcgcaatttccactccaggagtactcgtggaatattccgttgacttccgtatttactatttagtttaatttaacctagtctatgaattattttagagaagaatgagttttacaagacgtttgagcatttgaagtggattgtggttgacgaagttgacaccatgttgaatcagagcttttatgagtgggtagatgttgtagttgacttggttaataaacttaaatcaaaggagccaaaccagagcctagcattaccacaaaaaatacgtaacggcttattgtaattagtttgttttagtcgtctcagccactgttccacttaaatcccacgatatcgaattactggagctaaacagacctattctactcagactaagtattattcaattttacatatcaaattcacggtaatatttactaatatttttttagaggagagtatttacaagttgccagaaaatctaagacagagctacgtagtgtgttcaaacaggcctgtaccactggagtttctcaaacttatggcgtatttgtaccaggaagtaactggaaatgttttggtattcttctcaaaagtagaaatttgccataaaatatcaagattgatgcaaatatacaacctcaaacagtattatattaatatatattaacgaatttgatatagtggcggaggatttaaggctactgaactaacaggaagaatgtcccaaaaacaaagaaataacgctattaaaacatacaagtattataataataatgaacagtatggtttagggaagaggatagagtttgtttgttgtgttcagatgtggcttcaaggggaatggacctttcaaacactaaggtggtagtcagttatgacttcccaaataaactctcaagttatattcatagggcaggaagaacagcaaggtacctgaatcatatagataattgaatttagaggaaataaaagggggacattttgtgtgtttgtgtccaacaagactgagaaaaagttccacaatttcatgaataagctgaagattaatgaggagaaattacaaaaaatcgagctagatgtagttttgagtaagaagaaagtggaagaaataagtgaatcatacaagttaattcttgaaatgacggaaaaagcgttagaattggaagcatcaggaaatttagaatacggatcagatttaagtggaagccttgagttacttaagccagtccctgaaagggaagaatgagatctatcaggtgtaatataattttttaattttcagtatatctactgtgttatgtaatgatgggattttgttttatatttagagaaaatgaatttaagataactattgtaatatgagattaaagtaatgataatgtgttagtgaattgccttaaaaatttttggggaaaatatgtaaattttcaacacacagcaccacaatagttcataaaaactaaagtgtgtatacaactaacggccctaattatcagctaaatcttttaaaatataatggtatcttagggtttctctaaattcattcttgtgtcacagagtttaataatgtttattactcaggaatcttaaagtcgagtttatgagattccttgtttttccaatttaattctggacattttgtctctaatttaccgttattttagtttgttatatattaattcacttcatttgactggtatctcgaaatgtcgattctgcccattcttctatttttgtttgctcaggcgatttccgggatgaaaccagccgtaagcctcttaaatatgtacattcttattttgtagttaaggattctttttgtttatttagtttaacataatgttaacagttgactttattgttattgaatattttagggaaacacatgccgccttccagccttaaacaatactatgaacaggtgtgttcaaaccttaaaggatttatcaaacggcttactgtcaattcccaataatactgttcacaagttccatgtatcgcaaaaataaattttaattatgaacttaattttggattaggtgaagaaatcgtttgacggtggaaagaacgtggtgagtgttcatttgggcaaatcagatgacttggtcaagcccatgatgtactccaacgagaactcacttgaccctaatgttaagcccaaattccagaaaaactatcttaatcttgatgagttatcagtaaactacacagtgagtcatcattttagttaataacatttatagcataaacttgatcaagatctatcttataccggtaacgttgtaattgatttaccaagaactgcccaaattttccttaaaggtatttttactccattaaatactatttttgaattgtgtgtataaatcactaacaggggttggaggtgctgaggtgaaaactgtcaatgttgacacccgtgacgttctaaagagactagatttcattcttagatatcgcaatacactggttggaggatcatacaactttcgctcaagtacttctttatacaattagtttatcccttttattacttctttatacaattagcttatcctttttattactcctctgtcacaaatatgttgtagaggagaagagtgttgagttgattcagaggttggagaacctgtacaggttatatggcaagaacatgaatgttacaccaaagttggaattaatgtttgacaaaaacaataaactgtcaactagagcttgcctagtcatgaaaagagataatttaacaattacaccaatcatttatccaaaccaaaagtaccaaataattagttaacccttgatatgtggttattaattattatagaaaatgcgaattggcggctgaagcaaagttaactgacgaggttaagttcggagtgttcgttagcaaggacaagaatttgtacttgaacctaagctatgaatcaaactgggggaaacattcatggcagcaattttctctacgattcgtactatccgacgtattgaaatcatacgcatatctacagaatgaactccaactttaatatgatttaaacttttatggtcacaatattttataactatggaaacatattacagtagaatattaagcggtagcagtttcagaagattctcgtacgtaaagcatattattgcacctaaattggaatatatgattaaaattttttaaaaaatacctaattagaatgtcgtttccaagtttgcccttcagaactccattctcccactcctcgggatctgaaagttgaagattcatgtagctatcgaaggatttcaaggttcctgagggaaaataataataaaaatttttaaggaatgaactaacccttgtattccatcccccatttgagcttaacgacgacagttttaccagcaagactagtgagaaagggtttagggttcaaaggagcaccaggctaaaaaattaattataattataaaacaaatagttagaatttgacttacattgctggattcttgacctttgggcattttttataaaaacagagcgatataattaagaagatataaatggagtggaatccctattagtaccaatattttaggtatgaaaataatgaaacataaaaaaataatttataaaaaaactacaaacattatttatattaaaaataaataataatttctttaattatttccccagagtccagaggtatttggaatccactcactacaatttactgttttattattcttttaatgaatatgtcagatgataatttagaatccagtaaaaatgttgaacctgaaaaccaaacaatagaatatccaaagaagcaacttttcaggcaaagagctgtatgttacttgtcacatatatattattaataacgcacaattaacactttaaacaatttttatagcactgtaaccctctgtcggacagtttcataccttatcctgaaaatccaagacatgttaactggtttaaaaggtatcccagtgtgtacgacaatgatcattacctgcaattcaacagttagtttcatttaaataatttaatattttagcaaatgattaccctgaagactacacaacctcgctaggtgactttaattctatttatatacagatataatctacatgatatcctaatttacatgtatgtacatttagaggatgaaaattatccaaaagttgactttcttgatgtcggatgtggttacggaggactattaatatatttatctaaactttaccctagcaaattgtcactgggaatggaaattagagataaagtatgcaacttattgtatatataattttataccatggtatattccattttaggtaacaaattatgtcggaaagaggataatatcacttagagaacagaacccaggagaggtttgattgtaattagtttatgcgttcagtaccttaacatatcagtggttcgaacgaactccatgaagtttctaccaaattatttggggaaaaaccaggtattaaatgaactatttctcttaatatattatttttagctggaaaaaatattcttttgtttcccagacccacattttaaacgctcaaattggagaagaagaatcgtaaactaccctttactgtcactgtatgcatacttcttgaaacccgaaggaagactatacataggtatttcttaacttacttgttgttagtagttatatatttcttaaaatttttgatattttaactaatatgggtcagtaactgatgtgtacgaactctacgcgtggatggaaaacgcacttgaagatcacccgttatttgagcctctaaacgatattgataaggttagtatacaaataaactgcattatttacaaaatattggaatacacactgtgcaatgttttctagggcaaagatgagtgttatctcacatttgataaggagacggaagagggcaaaaagaaccacaaattgcagtcaacaacatataaaaatgtatatagaagaaaataaaccctttaaatagtctggaaattccaaaagtttatcggatctacgctggtaataaaaatgtggttgattatggcatgaataaaatcaggaagaacaaccaacaaaataattttttaaataaattttaacgtatagtaatttaagattgaataatatattttaattttggtttttattgtaaagtaaataatttgttaaaatttgttcttattttgaaattttcagccctaattttttaatttaatttctacacacttgtgttagacttaagtctagtttgaactgtaattttatgagtgatggtttctcgtgccttctgtgcagatctttggtttaaaacaattgaaatgctgaatgatttaattttacggccctgatggaataatttttagattcagtttgaaatcgtgggattctaaaataatttcaagatggagtttattattcccatctacctattaatttcactatggtccctcaaggtctgtgaatcgtcggataaattcgatccaaagtctaccaagaactctaaagctactcaaacatctgatactactgatacagataatgataaaaataatgggacctcaaaagataggaataaagggaaaggtgatcataaaaacgaagatgaagggtatggtactggagatagtgacagtgacgttgataggtcagataaatgtaataaacagggagatgttgccagaccgggtgaaggtaatagacctggaggttctggtaatgacaaactaccaccacaacaaaaaaataacaacctagttggtaatgctggtaaacaattggctaaaaatatgagatctggagattctaatggagacaaaggaaatgaaggcaacaaatctggtggtaatggtagtgacaaaggaccgcatcaaaataaaatccctgatattggttttaatccaggtggagctaagaaacttggtggtccacctattaagcctgaagttatcaaagtaacgataatagactctgaggatgaagaagaggagaaaaaaaagcaagaggagaagaacaagcctaagggttataaaatgcatactaacgaagaattagaagctactcaattaggaggtccagcatattttgatgatctagaaccaaaaaacgaatgtataatttcatgaagatataaaatttgacattgtcacaagtaaaatgtctctttttggcctcttcatagttgaagaacataaataatgtagtagtattggaccaataatcatcaaataataaaatcattgttattaatatggttgtacaaaggtgtgtaagaagatcttcgtgaatacaacgagaatgtttttaaagataagatgctctggttaaattaagtaaaaagcgaaaacataagtgtaataattaaatttttatgtatccggaggctaggaaaatcgagatggtttaagctctaaaccatgcacagtggaatccatttgcaagcaattgcataatatatgttggatttactaacaataacgcaatgtgtaatgtggtcattaaatacaattaaataaaactcggatattaaatttaaatccgaaaaaattttatattattatacttagtattgatacaagaggtcagtaaggctacaataaaagtctatcataaggaaagttccttgataaagatttttcaaaaacgggtttggtaaattcgtttaaattcttaaagggaagatgctaataaagaatatatagattctacaatatactagttattgtcgtatcgtaagtctgaactgtataaaggttcagaattgaacataaatctggatattccagatttaactaagtatattaaaatattctatcacttagatagtattctgaactcattcttgaagttttgagaatgaagcttatattgattgtagcaatggctttggaggtatcgagggtcgtaatttgtacacccggtgatgacctcaaaaaaatcgataagaggaataatccctcaaagatgtatcattcgcttgatataacaagtcagatcagcagaaatttgttcgtttttgataaaaaggagattaacggagtaatatacaacgacgtcactgtaaaaccaggtgtaatcatagatgaaatttacgatggagattcagaaatttggagagctaaagctaacaggcaacttatgaaactcatgataattcaggaaaagaaaagtaacacttacatagtcttaacaaaggacaaacacgaaagattagctgaaacctacattttggtgactagggttctattgtcatttgacccttttgtggatttggattatccattaccagactaccaaccagattcctatgaagaaagaggtaaaaacctaagaactagtgaagctcagaccgaacctcaagttagaagacccataaaggataccaaggctccatttcagaataaagaatacatgagtgaactcttaccgaattttgtaacaagggcaaaattcagagaaatggaagaagatgataaagttaaagataattcaggcacacagacttctggcccgaagtaattaaatccgacctatacttaaattattcaaaatcaatacaatgagacaaaatcagtgtattataaatataataaagtattaatatattataaactaggttagtaatttagataatcaataaaacaacaatcacacaggtggatcttaaaatgttaatgaaacaaaattttttatgtgaatataactaatttaaaggaaggaatttgattctattatttaagtttgggttatgaaaaaatatttttagaaaaaagggtgtcgatctcacattttgtgcgtcaacgatataaaatattgcctctgaaaagaaaattaaaaaataaaaattgctccaaataacgttaaataaacaggatttgaatctgtacataatgttttggaataattttaaaattattttaacgagaaccttccgagaattggatgtcgttgtagatctaaaatatacaaattccccatagatgaaataaatttttaatatttatgaagtatataataattgtataataaaaattttaaaatgaggcttttgttgctgtcgattgttatattatctttcctcaaaatatctaacgcttctgataaaaatccagctaaagatccagataagtctccagataaaaaaaatgttgatcctttacaccattcaacacttcattttagagatgttgaaaggttattcgcaactgaatctacaggtgaaggtgatcaaactggaccggaacctcctgaagaggctattggtgaaactgaagaagaggattatgaagaaggcgaagagaatgaagcacttgtaaggagtttgctagaagatgatacaaaaacagctgaaaaaataaaatcagatcaaatgaaagctcttgacttgtccgtactatttgaactcaactcaattattgaggaagtagaatcggaaactgatggtgaacctgaagaagaaagtcatggagataccgatgaaccagactcaaaaaaagaaggggaaggagccgaggaaaaaaagaaacgcaagaaagacgatgattctgatagtgatggcgaggaagggggtaaaaaaaagagatttaaacctaaaagcacgacggatagtgatgggaaacctaaaccagaatctaagggaccgccagtacctaaacctagaacacctaaatcagatggtgatgggaaacctaaaacagatcctaagaaaccaccagtacctaaacctagaacacctaaatcagatggtgatgggaaacctaaaacagaaactaagggaccaccagtacctaaacctagaacacctaaatcagatggtgatgggaaacctaaaccagaaactaagggaccaccagtacctaaacctagaacacctaaatccaagactgaaccaaaacctgctcaacaaccacaaccacaaccacaaccacaacctgagcaagcacctgtacctgaacccaaaaaaccagaagataaagattcaaagggaccagagccaatggacactgaacctcctaaggaaccagaagataaggatactaaggaaccagaagataaggatactaaggaaacagaagataaggatactaaggaaccagagccaatggatactgaaccttcaaaggaaccagaaaaaccgaaggaacctgatggaaaggatcctgacgaccatcctgaagagggaaagaaacccgaacctggagaagataaaagtgatgatactaaaggtaaggactccccaaaggaacaagaaaaacctaaagaaccggaaccggtaccacagcctgaaccaacacctgcaccacaaccaactccagtaccacagcctgaaccaacacctgcaccacaaccaactccagtaccacagcctgacccaacacctgcacctgaaaagccagaagataaggatactaaagaagataaaaagtctgacgaatcaaagcctatggaccaacaagatactaaggacccaggaaaacaagaagctgatccacaacctaaagacggtgagaaaaaggatgagaccccaactgaccaagaggattctggtaagaaggggaaacaagaatctgatccagtaaaaccaatggaaactgacccaaaaccggagccacaaccacaacctgaagatcctaaagataaggatactaagggaccagaaacaccacaaccacaacctgaagatcctaaagataaggatactaagggaccagagccaatggacactgaacctcctaaggaaccagaagataaagattcaaagggaccagaaactccacaaccacaacctgaaaagccagaagataaggatactaagggaccagaaactccacaacctgaagatcctaaagataaggatactaagggaccagaaacaccacaaccacaacctgaagatcctaaagataaggatactaagggaccagagccaatggatactgaacctccaaaggaaccagaagataaagattcaaagggaccagaagataaaaaggatgatacgaaaccacaacctgaagatcctaaagataaggatactaagggaccagaagataaaaaggatgatacgaaaccacaacctgaagatcctaaagataaagattcaaagggaacagagccaatggatactgaacctcctaaggaaccagaagataaggatactaaggaaccagaagataaagattcaaagggaacagagccaatggatactgaatctccaaaggaaccagaaaaaccgaaggaacctgatggaaaggatcctgacgaccatcctgaagagggaaagaaacccgaacctggagaagataaaagtgatcagaaaaaggaagatacaaaagtaggaacacctgagaaaccgaaaccagaaggtgatgatgggctgcctgaaaaacctttgccaatagatcgtaagttagggacaacagactaatattatttcagagtcgacgccgtatgttccaaaacctgataaaggcggtttatttcaattaaaaacacccaaattagtcttcttaaccgatgatgagaatgaaggacctgaaggacctgaaggacctgatcctcttaaaaagaaaagaccattcttgctttacgataggccggggaaaactccaaggagaccaaaaaagagaaagattaagcacctttatgaggatgatggaagtgacgatgacgaggatgaggatgaggatgaggatgaggatgaagaaaaagaaggggatgatgatgatggaagttataaaactacaggaaaagataaaaaagatgatgatggaagtggaggttcaggatcgggatctggaactactactacttctggatcaggtgtggtggaaactaaacaaagccagggtgatggtagtggtagtgccagtggaagtggtagtggtagtgccagtggaagtggtagtggaagtgccagtggaagtggtagtggaagtgccagtggaagtggtagtggaagtgccagtggaagtggagataaaccaaaacccgtaagacgccctttaggactaccgggatcgtctcaatctaaactaccaattaaatcatcaggtccaggcagaggacctcttaagacaccagtagccacgggacctggtaagggaggtataggttcaacatctggtataacgcctgtatcatcgggtccattgggtgacccctttaaaacacctgtaagcatgttacctcgtaaggtaggatcaaaaatccctgtgcccagtaaacctagtaagaaacccagatcgtcttcaacttcaagttcgggtaaaggaactggagcatcgggatcaactaaaacatcaccaaaatcaggagacgagtcagaatcgaaaaaaaagagatctggaggaccgacaacagttactattccacgtagaccaccatttgtcgtaccaggaggaagtaaagatataaccacaagggggacgccaagaacttcagcaccagtaaccccgaaacctgaggaaacgccaacacctggaaagagaaggtcggagactgggacaaagggtgacccgtcaagagggggtgacggtgatacaggatctagaagatcggcaaggttattaaccagaggaaggagaaatccttcaccctcaccaacaagaacaggtaaacaaggaagggcggggagaaggtagagtagaggaatgaaaatttatcgaaggacgcaaattaaacatgttgattataaaccagccattgaaactaatggtaacgaatgcagtttatagattccaagaaaacagttaaagaatatcggtgtattttatctcttaaaacattgttttggagtttaaattgataatgtaaaatttattaggatgaatttattgtaacaagataaatgtatgtaatttagaattagaataaatgtgaacaaaattagataaagtatctagtaaaaacattacataactgaatggaaattaatgtgaaaataatattttaaaaaaatctggcgattctaaccctttatgtcgtaaaattgtcaaaaaaatttcctcgaaccctatattgcaaagtcttgttattagcttttacacataatttatttttatcattttcgaggttcacaaagattaaactcactggattccccagcctttgcctgattaaaaggatgatgcacgttcttctgaagcctaacaacgacgaagtcagggctttgtaccaaaatcacaagtcattttacgaaggcgactgcggtttggaccttttttgcgtcgaagaccacacagttgaggctcacgatacgtctattattaatttgggtgtccgagtctcggccttcaagaagctggaagacggaagcacaggcaaatccgtaggatggttaatgtttcctagaagtagtatggctaaaacacctctcagattatcaaattcaggtacatttaacatattttcagttttttctcatactctattttattatgatgactgcataaatgtgtgtattcgttatataaatatgtgtattctttggctaagtttttaaataattttcagttggtgttattgaccctcagtttcgaggtgagctgaggttatcactcgataacattaaggacttcccttacactgttaagaaaggagacagacttgttcaaatggtttcatatgacggagaaccaataacgtttgaggtattgcccaaacctaagttatttcttatctgttcaggttgttgacgagttagatgaaactctaagaggaagtaaaggcttcggttccaccgggagataatcacttgttacttataatcctagtttacatgaatccagcatggttactgataattgaatattgttagttatacaatatatggtaacgtattatgaattagcatatatagtgtatattaaattaactgtggctaagtcttctgatttttacaacttctacatctgattgagtatggttttttgtggtatgttcctctgacttgaatatctttatgtacttctgcttgaacctttgatgccacttactgccatacaaatttgccattaaatcctacgcatttttaaataatgtattaatgagtaaaaatagtaaaaagataactctaatgagtaataggacgagtaattcttgaatgattaactaatgaattgttggaaaatgtgtaaagaaatacctggacgtgtttattatcaaggcctgcaaattctgcgattttaatctcctgaggagtctccatttcataggtttcttgagtaatcactttacggatgtcatattccaagtaaactgagcgatttctcttaattaactggagccacctaggaatcgagtcaaggaaggtcttttcagtgcaagaaaagagtacctgctccaagtcattccagttagggttttcatggcattggcagatttttacatcccttgaaatgtaactcttatattcacctagataatttttgtacatgttgtccatgtactcatcctcgtcacctgagttgtaattctcagaagacgatgacgagcgtgaatttgggttatccgtcgaattatgctcatataggtaagtgttatagtacagtgagtgtgttgagcaagtgtgaatttgagtgcgatcagagcaatcgtagtgtttttcgagtgcaaatctgtaaggacttgtgagtaaaataagtgcctgtctcgggaaaagatcaaaatccgacaaccatgagtagaacatcattttatggttaaagtcgatttccggtggtctaactgaaaacgatgacatgataataaatggtataaaggctctcaagaggtcagtggttccatttgctgaaatcagcgggtgtacccaaatacactttaggcaccgttcattggtttccaggatctcaactaagctccaagctactaatttcgtcctcttaatcataccaaactgagtgttagacttaaaaggttcggtgctaactgatataaacaaccctaaacatacattaaatattgttgaggttgtgaaaaattagtgaggtgtttaaataataaatttaaaaataaataggttttgggataaatatttaaactgacaaatatgtttagtgataaatatggtactgaaatacctgtgaaatcgtggtcgttgagatcactaacaacgtcttgcaagtatgatagggttttggggtgaggttcaaagagtgaaaagggtgatcttgagtttcttgggtctgagtgcagattaaattccgtctccaaaaatgactttgagcgcataatctgttcaatcatatgtctccgttgccttgtaataaagtggtatgatgggtaggtggtagtgatcgtgggaattcttgaagtgcgcctcgacgtagtcgaatcatcagtgaaagattctggaggtaacttcctcaccttagccacaagaccgtgactctcgaaaaaagaaatacacttcttcaatagtttaaattcaaatgacaaaggataactcttgtcaagtaagtagtcgaaatttggagttttagaagctttatcactatcaactaatggtttatcttcagatttgttctgtaaaatcggtgattccatttcattgtccgaactactcgtactactacttttggagtcagaagtaagttcttccatctcttcaatataattaccattgccattagtattattgtttaaaattttcttattgttcaaattgttaggcgattttaaattcttactacagttattgaagagtttatgtttagtattttctggtccaaaaagtagtctgaagcagttgaacttatcagaatcaacttttgcagaatctttaatctcaagataggcccatagcgctgaaacaaacagacgtttgctctggtcaaactggcctccaatatgcttatttaccttcttcttccaggagttcgaaatctctcggttaattcttctagagttacccggacctcttttaacaccattttcattagattcaggagaatcatctggttgggttgatgaagttttatcactatcggtaggagatatagactttcttgagtggactagccgtgagtcattcctatgatcagtatcaccattagtatcatttgaagtgtttttgtaaaaatagggcgtttcgtttatggaattcctgacatacgggctcaagtagatcacagacctctttggagccaatgttttagtatccatttgtcaaatcctaacaacatcagaaagaaattacgggtaaatttcattcaggacagtaacatttaatcagattaacgtttgttattaatattaaaatcaataaagttgaaaacaattaaaaataggtcgagtgataaatttaaaagaagagaacaaacaatttattagataatttgttaaagaatcccagaaataagttgaagtttagaaattaaagaggtttaatggagtttaaaatggaaacaggagataaagattctggaaaatgtgtaaaagtagaagacgaatgaatccgggttgaggccggggaaaggtacattattatgtggattctaagtaataaaatagagatgaattaaaacttaataaaatagtaaagaaaaattataaagtagacacaatattacaacgattaatgaaatatacccggcacctagggctgaaacaggatctaacaattattaaaataaatttcctagggtttcagttaaaaaacaaaaaaccaattaaaagaaatgacaaagttttggtaagaataggtaggaacccaacacgacaataatactccatatatatttgggccaaaattgacagaaaccctgtattctatcagtattcctcgtttttatctataaaaatgatcgtctggtcctttggatgtgaaaagcatgaagattgagaagatgggaaccacaagtagcgcgcatgaacacacaaagtcagttaagagcctctttaatcctgaaactttgtttgtttttgatcttatattaatcattgtacccatgcaaagtcctgaaatcgcacttaacaggtgtgccaagactacaattgagcttcctttaccaatagttttcagaaagaacaggcatatgtaactaacaactacgtttgttatgttttggtattctcggtgaaccaaaaagggaaataggaagaatctacttagtagagctcctgctactccccaatcccctgcgaaaccacttgcctgtaaagtgtcaggtgtaatccagcacactccaatcatcccgtaggctgagcttgaaaggtagacgaaaattgtcgccagtatcccgtttaacttctcgaatactgagctgaacctcaaatgcatcattgtactaataaccaggtgagcaaatgaattgtggaaaaacgtggatgtgaatatcctgtgaatctccagattgtccctcaataactgaccactaaatgctccaaattgtttactctcattctcaatatctacaatcaatttgtattaattttgtattaaaatacttatagttaattatatatatttaagtagagaatgtatacaatataaaagtacctgtttgcttaaaaatttttctaagaactaaaacccttagaatatataaaaaccattgtactacgataataaggtttgaaaagttagttatattaaaaagcgggaagaagctaatgattaactctaaaaaacgagctccaaacgatttaaatgagttgaatgtaaattttttaaaagtgcttgtatcagtggtaggcctttcgttaattaagaatacaaagtagtcagaaaatttattgttatgaaaagtgttactggcctcctttttgaacgattcagggtcacttgggtgggctgaacctttaaaatcaaagaaaaaacgcgtgtttctaaaacttttcgtcctactcatgaactcaaaatagtcatcagactggtctgttgacctctttcttatcctttctctactctcttccttatagttcagaggagcatgttcaaccgtcttacaaactgaacaaggttcataatcattttggattaacctgagactatcaacagttaacttagagttataaaggctgtttagcagatttatagtatcattgttacttatatcctttaacttattaagctgtgtacagcatatttcgatattgttctcaaactcctttgtaaacctgttctgtctactcacaagtttttcaaacatgttttcgatatcatcgacattactcatgtcaattactgaagtcgatgggtacgattcgtcttccattttaaactaactgagaaaaaaatatttaagggaaagcattctaatgtttagggctgtgtcataacacatttaactgcttttttcaaaaattaaaatttaatttcatgttaatttacaccaaataaaaataagaagaaaaaattaaaatttaaatgaaattttgaatcttatagtgcctcagcactttctcaaaactacttaatgaaccgataagttgttttaattcatctatattgttttttataataaaatgtgatttatttttaattttaaattccttttttgtagttttatatacttcttctgattttggctttttgttgagtttctgtttcttttttattcttcatataatcatgatttttaatttattcatttccttagtgtaaaatatatttaataaaatgattaacacatcattttctactgatcgaacgttagttttttacaaatttattcgtttttcttatcttaaatcatcctccgattcaatatgccttgattctttaaatcataattcaatttatcccgatttaaatcaacgggattacttttttaattcagattcttttgttaattcctccgattctttcaattctgactttatgtgtacactcctatgctcaaaaaactcagtttctcctttggatgttttacgacatctttcaatgtactatggctttaatcccaaatcgtttcagcatttccgcgtttttgtgcttgttcctcttactcaatatttcccttcattacataatctgacccacttggataaactttcagcctcatctcatacttccaagaataataattctaaggtttcagataaattctctaatgatgatggtaaaaatataaactttgatactattacatcacctaaagatcctataaatgataagttagtatgggtttccgccaacttaaacaattctctttacacacttaacggtactgtacacctgaagatttatctccccgacttaaatgccctaaatttaatcaaaccagtagatattatccatgatagtagtttcaattttgactttaaaaaatcctctgaaactaataaaaatgaaactaaaattaaatcttcatatgaagaacataaggaacccgtttcttcattaggttagttttactgttaatttccatagttagggaagaaattattcaaaaagttggtaaatggtcacacacagctgatgggaaactcaaggatattcgaaccctgctatcaaccatacaaaatgtacttgagatttctttttattttttcaggttttatgggaagatgtggagtgtgaatctatgcctctaagttttttagtctcggataaggactccattaaatcatactacaagtttcctttgtatacatagatatatataaatatttttacgaaaatatacgtataattgttgttagaaaagctttattggcatgccaccccgataagcaaagaaaaaagaaccaacaaaacaaactactctctgaattagttatacaaacactaattaaatcgtggaatgaatccccttaatgtagtatttgcggtttatcagccatgtatatttattataaattaggatttatctgcccatgagtctcctattgagcccatggcctctacagggactttcttgaggtacttttcgccagatttgaccatagtgtcaattaacattttcagtgcctaaactacagttaatgataaaatccaaccttttctgcgttatcttcggggacttcaagtattatttcatcgtggacgcatatgataatcttagcattcagcggcttcaccaagtcaaccagcctagccattgtctcctttgtaatgtctgcagatgtaccctaaacacattaatatacaacttcaaatgattgtttttagaaacctgtactgggtagtttagggaacgtgtaaatgaaaaggattcaaagactgataacctattccccagggttctaaccattgtcggtctactattctaaacacaatttgaacaatttcaataatacctttacggaattgtgccagtttaagatccctttaaaattattgaaaaatgaagtgtatatttccttagcctcattctgagttagctttaagttatagcctgtctccgcatacatcctcaacccatttatagacattccaaagattaaaccgaaattcactgctttcgccaactgtctttcctctttgttcacgtcatttatattcttatctaatggaacattggttgtattaataatttaattgtttaaataaaaaattactcttcagtatgcttgcagtcagagaatgtaaatcgactttctaaaaaatactataaatgatatggtattggagaagtaactatataacttgggaattcaaatacttgttgatatgcttgtatcattttgggatcgtttgctatttctgctgcaattctcagctcaatttgtgagaagtctgcaatgacaaactttgagccctttggggctacgaaacactctctgaacttcttatctcttggaacctgctgtaagttaggcccgtcacaactgaatcttccactttccgctcccagctggttataatttggatatattctctctaaaacattgttattacttggtttacctacaacactagtatctagtgaactatgtagataatttacttgtgattgggttaatgtggtttggcagtttttgtgtaaaagcagttaaagctttgttagcctttctatattctcgcaaggatgaaatgattgggtttgacatgttccttattagtgtagactcactcgtatcacttataatctttttcttggatttgtccattattttcagctcctgtaacttctccaacacctgcttttgtgaattcaagtttatttcacctaaacattggttaatctacattactagaaactatttaatgaataatggaaatttttggtactggaaactatataattagtactaaatgttatacaatctattactaatgctaactacataattagtactatatctcatataaaatactttgattaagttgcgagtagagggtatttgaaatttcttgatgttcctgtttgagctcatcttgtaaaaattttagtttatcttcgtcaacttggattccgttaagctccatgtcagaagttgctaggatacacttgttttccacacttgctatatcagagaggttattgatcttaagcaaatgttccagaataacatatagtggcagtagaacaaatgagtctctggcagagtataaaagctgttcctcgaatagctgtagagttgaccagtctgagtactgttgggtcttgtcaagcacaatattgaggtaacgctcagacacatgtgttagcttgcagcttatgtatctgcttgcaactaaaagcttacttgccaccattgtgtcaaatatcggtccttcaaattcaaacccatacactcttaggaaatttatgtcaaacttaccgttgtggaacacctttactgtctccttactcttgaataatttcttcaaccattcacattttatcaactcatttcttcctggcacgacactttcggcatctggattattagtactaagcttaaagaggtctatgattaggcttggttggtttggtactgacagctgcactagtctaatttgattagtgttatggtccaggcctgtggtttcaatgtcaactccaactgccttcgggtccttaaaaagcggttccaaagattgcagtttgtcgtaactgtccacatatattatcccatcaatcagcagtgggtcgaaatttacactataatacacgtcaactggaattgaaacttgatcaccagtggtaacaggagttggcttactcgaagatgggggctcacctttgtagagtgattttggtaatttactcagatatttaagcttaaattcagtaatatcattgtttggtgttacgttaacacgttctaactttaatagtgacttactggtactaacaccaaatgagtgaacatctgaccttgcgctactctcatcttcaaccttagtagtatcaacactcgaatcctctttaacagactctacttcttcctcagttggtttagtagttattattgctgattgtggtattattgacctgatattttcatatattgcgtcctttttaatgccttttcctgcagtctttaccaactcccccaatccattcttctttacaaaatctctcatctcctttatactactgttcttggttatctttaatcctctcatactcaaatattcttcctcaaccaattcacttttagtttttagttttcctccttttccactgctgttactgttatcatttgttccaaccagattagagttagtattatcatcaccacttgtatcttcaccttcaggtttacctgaactatcactgctgtcagaattactgttagaggaagtcgtataattttgttgtataattttattgatttgttgtgtgattggttttaggtttagtagatcaatgcctattaatccaacattatttctttctttatccttatagtttgtacttgttgcaggtgtgggtctagactgtaaatcttcacttgtcatggtgccaacatttggaataccaatcggctcatttgatacgttagacccattaacttggggtaaattaagcttaaaattacttaatgagacttttggtttagtttcaggtgttccgtttattggaaaccctcctgagggcactgttggggtgtcaggttgatcttttttaaccttgggctttgtaaaattgttagtggtatactcattcaaatactctgttaccttaaactcctgtgcagtcaaagaaaccgggtcgaatttaaagtacactctccctagcaaacctgcaaatctgttcttcttaacatcaatacacctcgactcattaagtatattctggagtataattacgttgtcagcctcctgtgtactttttactgaaccgaaaacacttgaaagtcccaactgaatcccatcggcttcttttcttgggtgtacaaccaacgacaagtgaatattcttatttgttacaaatcttctaaacttctctattgtcctgttctgcaactcatatatatctttactgctactatatcctccaaaacttgagttttgtgacggtcctgagtaattcgataacataaactgcaggttatcgattattatgtgctgcacatcgtacacgtaaactgcataatccattgcgtccaacactatatctatatttgtgcttccgtgaaacttcagaaatcgtaatggcaactcgttaaacttattagcgtaataatcaaactcgttcaaattgttctccaaattccttcctacacaattatataacacaatataccataatataactcagcatgtgtaattgtgaattttagtacctgaaaactgccgtagcatagttttggcgagtctaacgttattaatttcaaaggatccccagagagttgaaacaccttgcaagcaatagtctagtgagagttgagagagtagcgttgtctttcctgaacctgtagatcctgtccacactgtcaattctcctcttctgtgaccctttagaaggtttgacagccctggcatggttatgctcttgataccgcatgttgttacagggtcactcaactcgttgtacaccagctgtcttatgtcactaaaggtcagaatctgtgaatgtgtcattacggttgcgtttttaaagtaattattcatgtccactcctccactcaacagcacttcattagcatctttcaacatcttactggtggtcttttgtgtggtagcagttgtagatttagagcctttagtggttgtcccagcacctttagtactagttgtggtaccctttgtggtggtggcagtagtagttggagtgttgagtggatgtacaactttaaccctttgtatgcctaatttattggcaaagtgtgatatgctagactgtcctggggcgtcgaagtccatccaaagataaatttcattaaacttttcaagctttggtaatagtgccagcgggagtgagtttgctccatttggtagtgaaattgttaatcttcctgtctcctggtatatactcattgcgtcaagttcaccttcagataacactatagaatccttttcctgtgcctcctggatcaaatgacctccaaacattccccaggcacctcctcttggtaatattttaatcttagacttatcgtatatacttcttatctttattctatttacatttaatttatctgttgtaaactctctattatagtcaaatccctctgagtcatcagtttgtgtttcaacttcgtcgtttgggtacagtttatttggagttgacagccatggaaataccacacatttctcttgttctagttttcctgttacagatttgaacttgaatgaacctgctcccacatggtatttcttaagcacatgaggtttcaagcctctggtctttgttagataatccaatacacatgcatattctggattattatacagattgtcttcaaacttgttcacgtcctcgattgtgacatctgggtccttttgaaccttctttgctccgaacggactggtaatgggatcagacgctatatcaaatgctcctggtaaatcacccatgtgtgccttaaaatcaaacaaactgcccttgtatccacaacgatgacaatatgaatttcctacaccagacattaaccaatatctaacctatataactaggttgttatgatgtgattgtatatatctacaatttgtgtacctgagtttttaaaaatttcatgtttgaagaggttgtcggatttaaatctatgaggtgggcagaatgggcagaacttgagtgtatactttattggcgactcattgtactcgatcttcttcctgttcaggtactcaactatatcttctcccatgttcctgtaatggttagaaacaaacgtgttagactcatccagtccgtatgagccattatatgaaggcatattcgggtaactggtaggagggtatgagtaaaaagaaccgccatcaatgatttttccactttccatttgtggtttatttaaattactaacaaacagacatttgtaaaaactgcgatttctataatttctatcccttttattatatctaaaccttattaaatttctaaggtttgagatgtcctttaaacttttcacactaatcatattcagcttatcaactgggctaaacttatgaatagtattaaaagttttaaatatgttacaaagtgttcgggggggagggaattgccttccccttttggaaatactaaaacttccctggcttaaatcagttttaacacactcagaaaacgggaacaaacaacttattagaattaacctcgttaaaaagaacaaaaaggccaccttataccttcctatcaacctaaatccaactttaaacatgttatttattattaattgtgtaaatattaattataactgtgtaaataacagtaacaggtgatgcaattgagtaaatatttaaaaataccttttcttggatatacgtaaagtgggctcattaagggcctggttagtataataggtcggttccatctgtcagcatttctggaagtagatataacaaaattgacgaatgtgttagggccaaatttgaaaaaatgggcatcatttcaattatttaaaaaatattttacacaaatcaacattaaatatttttagacaattaaaataaaatttgaactgattaaattagataaaactgaaattggagtttagtgtaaaatgtgtagaataaaacacaagtattaaaatccataaaataaccaccctagaccaaactagacaggtacaattaaaactgcgtttacaacataaatagaatcctcaaagattccgtaaaattgagaatatttatgtatttttcagtccgatggggtcatgaaagattccatgaaaacattcataatcttattttatttacatttaaattataatttattacttattttgttttttaaagaatatattttggtcaaacattagagctattctcttcactatacttaatttaatttcaatttttgagttatgagattccacgtttaacaactatattctcaaattatatccttaacattctattatataatatttatcatgtttatttattaaatagtttaagctttaattttaatttttattaggtttaatttcatagtttacaacatccgtaacttatttattattttctgtaaaatattttttagttattcattatactattttatttaatttctatgatgatttgtattatattttgataaattaataaaaatatgtcaaagggtaagaggagggaatcctctagaatatcaaatgacatctacagtcatttatctaacccgaacgatgatgagtctagatataaaatcaagcgtggtattttttatattaattaatcaccttatttgttagtcaaatccagaaaaaagcttcgtaagatacagaggaaggaagccaagagattaaaacacgaaaaaaaactcgagtggattaaaaggaggaaaaatgccaataatatgattaatagttctcataaaaatgtagtaaaacctgtaaataccgatgctaatgtacaaaacaatgggttgaaatcgatatataaacccgaatctaacaaaggattaaaatctgataaaaaagttagatttgacagtgaccataacataaaatctacgcctgaggatattgaaattgagtacttagagcgacaacttctcaaaaataagccaaatgtccgtgataagaatgatactgtcaagaggggtcgtaaagttgacgtattacaggagttgaaatctgaattcttgagggatggctttgatgaggactttttagactttttgtccaacattactactatcgcagacgaagaaaatattttagataatgagcagttataccctgaaaacaatactcttgtcaaattacgcaactacactcttgatcaacctgattaccaagatttgactgatgacgaagtagaatcagaggacgaacgtcatgaggatgaggatgaggatgaattagatgtagatgacgacgaacaaatagatgaagatggtgatgaggataatgaggaacaattggaagaggatgaagtatttgatccatcggatgtgattaagaaacaaataggaatggtgaatagattatcagaaggcaattatacagtaattgtgaatcaactatgtgaaatgtattcaaagataatttcaaaggtaatataagctaatccgtatatgtgtgtagggatcagagaatcaagttataaatgagttgtttgataacctttgtgatgtggtgatcaccatgattatcaatgaggtcaatgtagtaatttcacttgtggcaactcagtccgcattaatttgctcattatccaactatttcaactcatcagtaagtaaatatacttttatttatactacaatactctaaccctactacatacaattacataccaataaaaactattacatattatgtagattgtaaaaagatttgtttctaaattacttgaaaagcttgaaagtaacttggaattgatgttagatagtgacttgaagcagaaatcgccagttaacgaaaacaaactagttgtcaggaatataatcatatccatttgctcaatttactactatgaagtgattgatattgacgtcattttccacctgattaagctcttgaccaaaaccaatttaaatgaagacattttacagctattactcatactattaaaatactcaggtactacaatatatatttagatatacaactgtacattttggtttaggtcaaagcataaataagaactcagagattcttgggtatttgaacgacttgatagaaaagtataagaaggaacatgaagagttttcaagtaattccttaacaaatatagataaattaaaaatgaatcataaattttttgttttaaataaaattaaatataaaattagtttttaaaatcctgtttagaccgagtaaagttcattgaggaggagttgaaaagtaacaaaaagtccaaaaacgtcctggaacaatttgaccatttaaagtaccaaatccaactaatttaacttaattatgttgtaggaacatgataaagagtaagctgaatatggatagagtgacaattaatcttgagtcaatcattaactgcaacaataattctgacggtgctgatggtaacaattctggcgtaacagagtttgaaacgaaaattgctccgaaaaagaacagtagaaaggatgagttgattaaaaaggctactaaaattgggttaaacaaagatatacagaaaacaattttcatctgcatcatggactcaatcagccctgaaaacgccctagataatatactcaaaattaaacttaaaactcaacaggtattttacaaatttcaatccctaaacatttatttaatatcccctctagtattatataatggattgtttagtttaatgaagtcataaacatcgtcatttactgttatttggttgaaaaggagttcaactactactacattaaacttttgttaattttaacctcaaagtaagactatctttatttattatatttatatatatagtattaatttatttatttgtatatatttaataattttcactttaggttaaacttgaatgtttgtaaaaaatataaaaggcatattaacaacaacattgtactatatttcaaaaacttcgagtcactcacgcaaaaccagttttccttactgtcaaaattgttctaccatatggtataaccacaagcattcatatctgaatttagattctgaataaaatttctggtttaaggctccttaacttcatcaatgtcaaccacttcaagacaagctcgtttaagatttttataaacaaggtaactagcatgttttaacttgattttagttattttcaagcattgtaaccactgaggctgatgatgaactcgaggagtatttgattcaggagctactatcaattaagactgaggtgagtactattaatttaacttttgatagaaatactttaatgatttggcgtcgctttggaccaaacacattgaaagccactgtagagctaaggttgagaagtccaactcatctgatattctattcaagtcatatcaacgtgtttttaaatcataacccaataatatactataccaatatgtatataaatacatatataaatgtgtttatatactaatgtgtatataggcacgtgtatatggttagtatataagtatatgcgtatatagatgtatggtaaatacatatatatatatatatagtggtataaaagattatgatctagttttcaacatttcaacagccttttccttagcctccttgatgtctccaaccatgtaaaatgccatttccggtaagtcatcgcagcttccatttaggatttgctctgctccatcaatggtgtcgggcaactctacgaacctgcctggcttgccagtaaacacctcagcaacctggaacggctgtgacaaaaacctctgaaccttccttgcacgggcaacaacaaacttgtcatcctcactcaactcgtccatacctataattatcattaacataattaaaacgggatataagtaatagattatcaggtatattgtatataatataatataagttatatgtatataatagattataagttgttgatatatatatatagtacgaagtaaactaaaatatgtataacaaataataaagtgggataagtaattgaaatacctaagatggcaataatgtcttgtagtgatttatagtcttgaaggatcttttgaaccgctcttgcaacgttatattggcgttcaccaacgatgtgagaactgagcattctactggtgctgtctagtggatctacagctggataaattccaagttccgcaatttgcctggaaagaacagttgttgcgtccaagtgtgtgaatgtggtggccggagcagggtctgtgatatcgtctgcaggcacgtaaatggcctgaactgaggtgattgagcccttctttgtggttgtaattctctcctggagagaacccaaatccgtggctagtgttggctggtaaccaacagcacttggaattctcccgagaagggcactgacttcactgcctgcttgagtaaatctgaagatgttatcgatgaacagaagcacgtcctggttctgttcatctctgaagtactctgccacggtaagaccagtcaacgcaactctagctctggcacctggtggctcattcatctgtccatacaccaaactggccttgcttccagtaaaatcagcttcgtcacctttacctattcataaattataaaacatagtaatattgtaaatattaaactaatttcactatacataatactaattttaatatataatatggataaatcagtaatataatgtgcttatgcgtagtaaactgggtaatatagtgataataccgttgggtttgatagtacgtttgataactccagtggataacatttcatggtagagctcatttccttccctggtacgttcacctacacctgcgaatatcgagtatcctccgtgtttattcgcgacgttgttgatgagttccatgatgaggactgttttcccaactccagcaccgccgaataaaccgattttgcctcccttggcgtagggggctagaaggtccacaaccttaattccagtaatcaaaagagcctcatcactcttctggtcctcgaatgatggagcaggcctgtgaattggcaagtgatgctcagatttaattgggccaaagccgtcaattgcgtcccccgttacattcataattctacccagagttggagtaccaactggaattgtgattggagagccagtatcaaggacctcctgacccctcattaggccttcagttgcacccatagctatgctcctggcaacgccgtcacccaagtgctgagcaacctccagggacaacttagtaccatcattgtcaacccaaagcgcgttaagtattggcggaggaggcccatcaaatctgacatccacaacagcacctatcacctgggatatgtaccccttcctcatcttaccagtgtcagatactggagattggtctcctgacttattaactacattttgtgatttactatgaaatcttcttggtgaagtaaagtttatattagttggtaacaaattgtccagtttactaccaatattactgtttactaaattacgattaagatggttcttggaggataactttgatttagtggaaaaaataaggcgatttaagtttaattgaaatttgagggctgatttacaaaagggtgtgactttgaagcctgaaattgtgccgaaaaggcctggaactcccgctctgatacccatattgagatttatatgtgactgaacggggttgaaaacacctcactgaagtcacagattaaatttaaacctcgcaaccaagctcaaactcagattcttaaattagacattatttaaacaagtttttttatagaatccaatgaaacacaacaggtgtatatggggagttgattcagtacacaaatcaatataatttacaacggaaacacatgtagtaaatatagtggtaatagtagatagcgtgtagttttacaagaaaatagaattaatctatatatggaaacttgctaatccattctacaacttcatttttcaactttatgatatcctcatttacatccaatccgactttaaaatcaaccaatttcttccctttctcctctaaaaaaattacattaaccatatgaaacaattgtgtataagtatatggattaattgtgcataaatatatggattaattatgtatgaatatatgaagtaattgtgtatatgtaaactgtttatagaggtaccttgaactttaacgcagatgtcaacaacttttctgataacatcagcgacaaagaccatatcctgagggaaggctcctcttgatgttagtgatggagttccgagtctgattccagaggggttaaatgctgatttatccccgggaattgtactcttgctgatcgatatgttaaccaggtcacacaccagctcagctttactcccagtaactccaaatggccttaaactcacaattactgtatgattatcagtcccccctgtcacaactggcatatctctcttctccaactctgccgccaacactcttgcattatcaactattctttgtgcatacgttttccattccggtttagataactatagtcaactgttaaccattaaatatatattatagtagtatagtaggtggtacctgtttaagttgtactgcaagagctgcaatattattattatgaggtccaccttgtagagttgggaaaactgactgattaatgcactctccaaaatcaggcaataacttcttattgaagaagatgataccggatcttggccccttgagcgacttgtgagttgtggaggtaactacgtggcagtactcgaagggtaaaggatgaacccttccagcaaccaaaccggaaatgtgagctatgtcagccattaaatatgctccaacgctatcggcgatttcccgaaatctcttatagtcaatgtatctgtagttttttcaatccaattcattaaattacatataaataaatctaatttataaataaataatatgcaaattgataaatattatgtaaataattgataaataatatgtaaataatttgtaagtatggtaatacctagagtaagtggaagctcctgcaatgatgagtttagggcagaatgcttgggcggatttttcgagaccgtcataatcaataagtccagttttaggatcaagaaagtaagacagtgggctgaagaatatggaggaggctgagaccttcttcttggcgttgtagtacccgtgggtgaggtgaccgccggactccagtgagagtcccatgagtttatcatgaggctggagtagtgcacagtaaacagctaaattagcaggagagcctgaaagaggttgtacatttactccccattcctcgtccgataacccgaaaacctccaagcaccttttaatacataagttttcaatatcgtcaacgaatctacagcccccgtagtaccttttccccggcaaaccttcactgtatttattagtgaaaatggatcccagcgcctccatacaagctctactggcgtaattctacaaattttcgttatacattacttcataatttattaaattacctcggaagcgatcagattaattgaatatcgctgcctatctcgttctcgttccagtaactcgtaaacctcaggatcaaactcctttaggggaacttcatcctccaggggaaattccctcttatattccgtatgattcggtagtggcatgactgcgtttagtgaagataaggtgtttagggtcaagagattattttttcttgggattctaaagggataaactaaattaaatacaaaaattatacaggtaataaaaattgtaaattttctacaaatttttatcatgaaaccttcctacgtttctatccatggggataaatatcattaatttacccttaaaattatgtttataagatttaatattctaacacattacttaataaagtattatatattaattatcacattattatttaacaattaagtagtagtgattatatattaagtattatataattgttgtatgacattgatgttgtgacactatttccagggtggagtgacttgtcggtcatttgaagtgttgttttcaggtttgcgataaaagtctaaatttctatcagctggttctttaacacttgctgtttcatttctctcaaatgaactctcatatgagttcaatgaactctgaccaaccacttctggtgtataatttcccttatgtgtaccgaatctattagtctgagattcaaaatgtactgatttatattccgcattcgccatgccataatcagtattcaacattccataatcggtattgacggttttataatcagtgttgacggttttataatcagtgttgacggttttataatcagtgttgacggcgttgtagtcagtattaacagttttatacattggataagaagtgtttatagaagtgtatggtttagtgttatatgaatgttgcggaggaggttgttttggaggtggaggcggtacaactccaggcggtagaatctgtccaaccattgggtatcccgtgaatctgtttatgttggtaatgtttggatcatcaaatgacactcccacggttgtatgttttggattattaaatggcggaggaggcggcggtggtggtggcatcatcagtctattatcttccacattacccggtttatctgatagtttggtgacaagagtatctacaactagtttggtggatgtttctggtacagcggtggtagatacttgggtaacattggtattatcctgattcagttgaagaatagtattatcagaggatgacgaggcattatctgagtttccagaattattggaatattctttaaagaagttcatcaatgaagcaagtttattggtgtttactgatgaacttatttccggatcattgactttgccgttttctaccttgtctaccagcttgtgaaccttgacggaggaagcggacttactctcaccattatctgcggattcattgggtttgtgtttatatttgtttggtaggtgtgaatttttaatttggagttttctcttcttttccttctccttttgctcaaccattgtgttgattatgtccagcacaaaagagccttcgtgttcaagggaacctgccgattcagttgagtaatgtttttccaaggagtggactggctttttgggtttgtggtcctgttccttctggggaactgatacgtccctaattgccttccacttcttaataagattagttgcctttagcttaaccttgtcgtttgagcattcgtaatctgccttgctgagcctgggaggcgctcttcccagtgctatgcagttaactggaattccgatctttgaagtctgaagtatcttgaagtttatatccaatttgtccaacagttccatgcattttaggaggtaattggagctctttttcagtcggccgttgagggccagaaactcaaagttctcacggatcacatcaactccgcctagggatataaaggaatctaaggctaccatgtatgactgcaacaatatatctattaaacacgtaagagcaaactcatcacgcttatattttttcaaggaccaaattacgtttgataacaccactaggttgttcaaggccactgggttctctctgcacgaataatagtacttgtgaaacagtttacactgggaaacagaattagccgacccattctcagttccgacactgtctaatgagttatctcttcgggcactttctgctgaattctctaactctaatctcagaccgttgtataataatttttgaactgctaaatacgaatcagcctatacatatataacattaagctaaaaataccttatctaaatcaatggctattgtggagttcaattccaagtaattggttaaatccttggtaagattttcatctagaaagaatccagagtaacgaatcttcttccaaaacttcgaacaccagccgttcaaaatgtccaattccacattctccagtccgtcgacctctacataaaattatttacatatcatatgctgtttgtatcatggataactatgtaaaattttgaaaggaacaaacttgtaagagttggaactctgtccatgcatttttcggggtctggctttagaaactttaattttaaactaggatcctgagttattggtcgtgaattaatgtccatcagtttgttaaatagaacaaaacgtcacatttgaaaatggtgaatgtgttgtaaattttaaaaataaaaaataatctagacaaaactaataataccaaatcattgcaactctgttggctaagtcaaatataaattaataaacaatttaaaagtctacatttttaaaaaatctaaaatttcaagccccatcttaattcataggacattgttacatacacaatatatacttcacagactatatacattaaattatacacacattaagatattaatttgttagaaacttggaatcgactagacacttctcaggcttgacctgatcctactcaatcttgacggttttgcgccatcgcctccattcaatttatttaaaaatcgtcttccataccccgtctttccccgatttctattctcgttagatccactcatattgtccactgaccttcccccgtgatttgaatggtttggacttttgggttcataggttttgtgtcttggatatactttcccctttaatttcttgtaaccttgttgtaagtccttcatagttgtttttacatttgcaattgccttctttgggtgtattcccttgatcgccttactttctccaattttgtccaggtaatttttcaaaaatccaccgttcattaactttgggttaattttattcaacagtttatttcctccgcttccttcatttgagtcctcttcatctgatgtgctctccatctccaacaaactcgcgtctgaaaatcggtccaaatcaatatcctcctcttcataatcctcttcatcatcttcgtcttcgtcataatcttcattgttttccaggaacgaattattatcattcgcaggttctaggtatgtagtgccagtgaattcgtcgtccatatcatccaaatcattctcatttgcacttgggttattattctgataactctcctctaatggtcctctgttgtattttagtccattggcctgtgtcacagatatcatacacaacacataaatgaggagaaagaacttcctgctaaaaaacgcttttacatttaatctattttctgacattttaccaagattttattaatacgtagatatatttagtattattagagttgaatgtatcagtttaatatagttttatcaattttatatctataaactaaaagtataaagtgttaagcggtgttataacaagttcagggacacttttgagctattaattgtactattagtgagtcctagactcatggaactgtgaattctaagctaatacaatgctgaaatcattgaaataaaatataattcactaatttgaagtgtcaaataagtaaattaaattgaaagaatctaaaaatagtttaaaaagcaaaggaatcctctaataattagtgtgtagattatttttaattttcctctggtttaactgattttcatattagaattacataattaatattctaaaaactttttaacaattttcccggaaaaaataaaaattttgttttaacaaaattaaagttgtaaaatgtgatggaatcattttacacactttccgttgttgtagagtaatttaccaattaatttttaaataatgaatttttttcatataattgtattttatttttgttttattataaactctgagttggtttaggctctgatattttgttaaaatgccatgtttttagcatgtaccatatttaactttttagtttccacaattctccttgtaaaattattgtttttatcaggctctggctgtatttgtttaattaattttcctcgtgggatttctaacttttatcgcattccgaaatcccttaatttcatatcgcacattaatttttcacctttacctaccactaagacaaatactagactttttgaacgcagaaagtacaggctgaagataagggctgggggtcagtttcgcataaagcctaagaccaaccactcagtggctaagaggtttaagataactgccactgggaagctgatgtaccgtcgtgctactacccagcacaaacagcggcataagaggaggggcgccaaggctcgtctgcacagaaatggcatcatcacttctattcgtatgatccgtaaaattaagagcgttttgcacaacagataacttcaatataatatttataacgtacattattatgaaattaatcattttaataaaattacaagtcaagtgtgtcgttcttttgttcattttgctttgcaaagtctgagaaaagggcgtctttatactttaaatactgcgaggcatccgggaactcgaacttaaagtcactcaaatccaccttctcatcattatccaccaacggttccatcaattgcacattctaaaacatttaattataaacttcagagttgtatggtagtaccttattttttaaattgtcactccatttattaaatgagctttttagtaaatgcggtctatatgttcttgccataaatgtagcttcagcatgtcgattaaccatatgcaatatctacaatttattaaacacacatgtaggtaaagctggtaaataactcagtaattgaaaaactaattaaaatctgtaaaatagctttagtgatacttgaatacaagagtcgatatcgtttagcatataaaaggccgtaaatgctacattgtgcaactttgataataacgcagtttgtgccacgtatcttactccctcaagatcgcctaaaaattttaagacatgtaaattatagtgaaagtacctgtaagggtatgtaaaacgagtaagttttgcatgttattcgagtattggtatgacaatttagcaaccttaatctgggaacttttaagacagtaatctccaagtctcttccatttcctcttcaacatatcatccaagcccattattacatcaacattgacattatccatactaactgtatccatatcaacgttttcaaggtcaacagtgcccaaatcagcattttggtgattaactgtgtgatcaggtgattgggtgaggttgagtgattctgataataagagtttaaggcactggttaacgtttccgagtttgaggtggagttcaaatttgaggtctgggttatcagtgcataaaagcccgagttcgtactctccgaagagctgaaggaacctgcttgcattctctctcattttctcgtcaacctttgccaaagactgtttgagttcgttttttgcgattgagagttcctcgtcctcgaactcagagtgctcatcttttgaaactgagtttaacacctgcgtgtagtggtagagctttgagtggaactggaggtaagaaaagggcaggtgatacccgtatactgaatcatcgcataaatatacaagctgagtttcaggcaaataccctaccaagtggagatgcttgtcaaggtacacaagggtctcggtattcccagccaaatacatagacaagtgtgagtttgaagtaacgaacaaaaaggtgtcgttaacccacactgcacttgttattctttctaccaactccttctcaaattgaaagttttcctcttcaaattcttcagtctcgttctcgttcaaatcctcgccgtaagttcctccaaacttgcttgatcggttactacttggggcgtcaaggttataggataatatgtaagttgccagttgcgatgcaagtgctagtctattagaggaagggtgccagtaaatatcatcgacttgtagtgaaaaacgcttcactggcatgcatggtggccatgtgtaaaacagaatatcaacatcagttgacactccaagtaaccttcctccatgtaatttctgtacctgtacttgctgtaagtcaagcttctctctaagtgtgaactccgaaaacacgctaacttcaaatccgtcatacgttgcataatcaccttcaaatgaccatacaaattgtgacgcctttccaaacgttttactcttcatgccctaacaaaaattatagtattgtgtgttttataatatcataaataaatagtaataaagtgcaaatgaggtataaataggtaaaaatatacttgagaagtgtagatgatatattctgaatcaccgcataaacaaataaaacggccgttcgggtgatgtgaaacttcctgtggaaaaaactctaaaaacacattagacaatagttgaatatattttatatatatatatgtttacctatacataaatagtatgaataatatgtatatggtacctgatgaaccgatatttctgaacgataagtttaaagagtgtgacgggtcatggtttgagagatcagtgactgaggaggttaggttacatgtgagaatgtcagaggatttgaccatcacgagtttgttagagtacattgaggccagtggcttcccgcctgcgagttcaagaacacaaacacccgaatcactggccagtgcagtatctgtagtgttacttgccacgtgccaaagctgcccgtaaccataatttactgaccttttaatcttgtaaaggtttgagttccacacgttgaaatctccgtcctcacctgtggataggatgatgggaagccgggggtgatatactacacaggaaacaggcttaaagtgtttttttaacacctgtagacaaagcttggtttggtagtcccaaacccttatggtacagtcgtcagagccggagatgatgtaagggaacgacaaatttgagcaaaagtcaatgcagttaactccacgttcgtgccctgtgagggtaaagtaaggcttatttccaccttttccctttgaacttttagactttccagagctcacattactaacaacggtgttagcgctactggtaacaggtgctgcagaagtgttagcagtgtttgaagggttaggaggcagagtttggtttgtagaggtgagcgtaactctccagaatgaaatagtcttatcaagggagcatgttgcaaagatgttagggtcctttgggctccattttgccatcattacatagtgtgagtgcccttcaaaaactgcaagtttctcccatcccttatctatgtcccataaaacggcagtcatatcgtccgaacagctgattacgtaaggcaatgtcgaatgtaaatccaaatatcgtacatagtccttatgaccctctaccacgttgaccttctcgagtgaattgtagttataaacccaaatacacatcttatcacctgcagcaacgatccactgcttcctaggaacaaacttacaacacctcagaggcgcatctgacatttctatcttcttaaccaaggcctgagtattataattgtaaattgtaagggagccgttatacattgctgaggccacccatggctcggatgggtgaaggtcgaccgatttgaccttctcagttctaagttctagctttttcgtaaatcccatatgaagcgacatttttaaaaactaaatataggaattacaacaatattaattctgaacaaactaaatttatctccacaatttaccatacctcacaaataactgattaatctaaatgtgaattttatatttttgtaaattttatccaaaaaattaaattgttaaaaattgtacaacgaattatcaactcattaactttgatacatttccaatgtgtaaaaacattggcttaaacatataataaagttcttctatgataaacttggcttattgtatgactgaggtttagactcgttttgcgttttcattttcttgagcatttcagtcatatcaagttcatattcctgtgccacccttgaaattaaggcgtcaacctccctctgaggcggcttgaacggtgaatccttactcatattttcgctcatttgtgattcattcacatcctaaagttgattccaccatgtattttcttttaaattaaatgagtatctatatagtcttaccatattttcgaatattttcttaaaatccgttataacatcaactgaatcgagttttttgtaccttaaaaatctattcaattgaggtaacactttttttaattcctcagttaactaaaacaacatttaccagtatttaaatagaacacataaaatagtagtgagtagaaatagtattgaaataccctttgagttcttatcgcagagtctacttgtgccgttaaaatatctaatcttgatttaagctctaaaaatctcattgcttcgttcctcttaaaaattgagttagcggcgtggattctagcggtttccggattttcggattctattgcagatttgaccttcattcgctcatcttcctcctcctttaagcatttgtaatgtaatttttgctacacatttagattattattggtagataatttagtatcactgaattgaggtggaaaatgtgtaaattgtggccaaattatatcataataggggtaaaaataggtaaataaacaatgattaaaataaataatttgtgaatacgtagaaaccgcttctctggattgaagtgttaggttaacctttgtatccatgagtgactgactgccacccatgatgtgaaaccgaaatttaataaattttatttttgtgttttttaaaatttatttttagaagaatttgttaaaaatgggttaaaagtggatccgtttccataaattatggttttgatcttaactttggcaagtggatcaaattgtccagaacgaatacttttcaagttgtctagattaaagtatatttcgccatatttcagaaattatgaaataaacacattaattacaaatcggcttccaatttatgaaactttatataatgtacattacacatcaaatgtaaaatatacccatactttttttgaccctagctcaaaaaagagtggaatccttaaattcaaccgctccttatctaatcctaaccttaaatattacaacaccgcttccgattctccacaatcttcagatttaacaccctcaaattctgacacctgtattaactctgaagaatctaagaaacataacatcgaaatatcatatgaagagtactggaatgacgcggatatagaagaactggaacgagaacaccctgaacttgtagtcagaggaacagttttcattccagcctttgccacttatgagtccaaacttatactaacaaacagtacaaacataaatctagctaatacaaacataaatttgaataataatatactaaaggagtctgaggaccactctggagctaagaagaagggaacgaatgagttgaagatttatggctttatttccaggaatagagcgtttcacggcgattcagttgttgcaattaagtcgagaaggcaaaaagcagtgacacatatgccatcacaatctccaggtgctaaaatcgcgtataaagaaacacctggagagtgccgagtgattaaaattcttgccagatcaccgaacctttcaagctttgtttcaacatttaacttatctgagttttttgataataaattggaatatgtgaggtgtcaacccagagataccagatggcctgcatttaaagtatataaatcagatctaaacactgatgtaactactgtattaaattcatataaatctgattgtccgaattctaagttggacaaaaatattttatgtataaaccgtttcgtagaatggaaaaagagtgaattagaaccaaaaggaggtataatacgtgttataggggagactggtgaccctgattctgagatggaggggacgctgttgtttcatggcctagatccgaaggggttttcagagcctgttttagccaacttaaacgagttgatagaggagggaaacaagacaaaatgggataacaggaaggatatgaaccatctgtttgtaatttcaattgatcctcaagacgccaaagatttggatgatgcactttcaattgagctaattcccactaattcaccagattctgctgatggcggtattatgtatagaattggagtacatgtggcagatgtgagtcattttgtaaaggaaaactcattggtggatttggatgcaagaacgagggcaacttcagtgtatatggagcatctggtttacccaatgttaccccagcagttgagcgaagacttgtgttcactgcttccaaagaaggaaaagctttgtttttcagtttttgttgacgtctgtgagtcaggcgagggtgaaaaaattggaaatgacctgtatatcagagatgtaaatttcgttttatctacaataactagcaagaacagactcacatacgataatgccaaaacaatgttatacggctgtttaaacgtgaaaaggggtggaaaagagcttgatttggcatcttacagcttcagttatatcgagaagatgatagaggatttgggcataagtgacgagactaagctgtcgttggtgaggctttactacttgtcacagaagctgaggtattataggctaaaacaactcggagcagttcacgtggatattgacggttcaattaagtgtcatattcctaaacttactggccagaatcagaagtctgatgaacccattgatagatacttaaataacaaggggaaactggacagacgttacatgttgagagttgaaaagatgccgaaagaaagccatgaactgatagaggagatgatgttactggccaacacacaagttgctaagttcatttcagagaaaatcgacctctactttctaagaatccatgaagacacaagtaaggcggttaagtccttaatagcacaaatgctaccgaagaaccttaaaaatctcatccaagtggataagatgaatgttactgaagttttaagcaagtgcgaacattacatggacccttcagcattccagtccttgagcttttcagtgctacaaaagttcaaagaagctatctactcccccatttacagagatggtaatactcaaaacactaataccagtaacagtgttgataccagtaatagtgttgatactagtaacagtgtcaatagtagtaacagtgttgatactagtaacagtgtcaatagtagtaatcctgttgattctgtgaatgatgtgggaagagtggaagttagacattgggggttggcgttacctgtgtatttacattttacatcaccgataaggagatatcctgatttatacacacacaggatgttgaaggatattttatacgcaaaagttaggagtgactctgtggacttgctttctagaatttgcgaacgttgcaatttgcagaagagaagagcgtttgacgctcagaaagagtataaaaacttcgcatttaataagtatttgcagtttctatcattcatcgcaccgaaacttgacaaagcttacctgaaaactgtatcaatttcacagccgttcacattaactcaagatagttctgatgagaggaaaggcggaaactcgggagtttggggctatttgtataatgacgcttgtgtatcaagtattgttttaaaccatcaggcaaactctcaggaagaagcagctgtcagtgaatctaaaatcagaaagaaaaagagtaaagtaaacgaaatgggagaaaaaagagatatgggaaagagttcaatagtgttttatatcccactgttaaacgaacaaaggagtgtaagctgtgattcactgggtgtaaagccggtgaattttaactttgataagaaaagtaaaaagaggcaaagagtaaagagttcaattctgagctcatattatcaaaacagccgagaattagaaagtgaagaggaatatggaaaaggaaagtcagaaaatcaaggaacaaaagcacaaggaataacggtaatgatgaatactaagagattacacttttacatttatcaaaaagcaaaagtactacttataccaggctcgaaaatgtggactgtaagattaccaattgattatctcaaatgattctaacacattttcaacaagatgtaatatgtgtacaatatgtttataatgttgtattatattataaatatacatgtgtatagaagtgtatatagtaaattttggtatggaatatgggtaaaactagcagaaactcgtaaacttcttagtttggctccccacacatgttaggaatcacaagatataaattatcgtctaataatcttccttcaatggtagtcttatgcacatacgttttgtaaaaaagctgctcagtgtttctttgattttcgcctgtttgtatatagtaaattgctcaaatttaacgagaaatatttccagaagtttaacgccagaatcttgtcgtttcgggcaaggaaactctatgcctaatcgtagtttgataaaactaagaagattctcatttataaataaaaatcaatcatttccaaactgtttgtttacacagtctaaattaaactttaattatttagccagggattccagaacacttgttccagtaaaagactttatctccccctttggaacgcaatctacagtatttaccgggaaaggcgtaattaaggaaaaaggaatatttggtgatagagctgatttttcgacaatgactgcgactgaaactcagaccatgactgagtctgagacgtcgagtgtgacgttgaagccagttaagaagtttgtggagatttttaggaaggactacaagcctccggagtttgacgtcgagaatgtgtacctagagtttgacctagaggacactgaaaccaaagtgaggtcgaagctattgatgaggcgcagaccaaacactttaccggggaatttgacgttgaatggggacgaccttacctgcaatttcgttgcagttgacggagttgagcttaaaaatgtcccagttagcggatatacgcttgacgttgacgggaacatgactgttccaagtgcgtttttgccaaaagatgactctcgcacttttacagttgagacccacgtcacaattaacccgaagaacaataccaagttggtaggactttacaagagtagcgcggcgttctgcactcagtgtgagcctcacggtttcagacgcataacttattaccttgataggccagatgtccttagcagctttagagtaagggttcaagctgataagaagctttaccccgttctccttagtaacgggaatagagttgattcaggtgacttgggtacgaggcactttgcagagtttgtggatccattccccaaaccctgttacctattcgcccttgtggctgggaatttggcatcaatttcaaccactttcaagacaatgagtggaagaaacgtgttggttcagttgtcgtcagaacccgaggatgttggaaagctccagtgggcacttgagagtgtagtgaaggcgatgaagtgggacgaggagaaatacggccgtgagtatgatttggacgagtttcacgtattcgcagttcgtgactttaactttggagctatggaaaacaaaggccttaacatattcaacactgctcttcttctggccgacgttaataccacaactgacgctgagttcgtgagaattctgagtgttgtgggccacgagtacttccacaactggaccggaaacagggtcacgtgtcgtgattggttccagctcaccctcaaggaagggcttacggtattcagagaacatcaattctgtggggacatgtcaagcacactaagtaacaggatcagggaagtacagtacctaatgtccgtccagttccccgaagactctggacccatgtctcatcctattagacctgaaagttatatctcgatggataacttttataccccaactgtctatgataaaggagcattcgttataggtatttttatctagttttctactctcaatttagtattaattatcaatatttatacatatttagccataagttaggaaattatttgattagataatatatttaataatgtgttttaggaatgtacgagtcattgttgggagttgatgggtttagaagaggaatggacttgtactttaagaggcatgatttgagtgcagtgacgtgtgacgacttcagactagcaatggctgacgcgaataacaaggatttgacgcagttcgagcgttggtactaccagagtggaacacccgtggttgaagtagttagggctgagagagttgataataagtataagctagtgctaagacagtctactcccccaacaccaaaacagccagttaaacaaccatttcatattccattgaggcttggacttataggaaaatcaacaggtggagatttgctaggaaatgttttggtggagttgaaagaggagcagcaggagtttgagtttgggccagtcactgaagattgtgtattatcactaaacagaggcttttcagcgcccgtgaaggttaaatatgagcagtcgcctgaggaattattgttcctaatgttatatgataccgatggtttgaacagatggaatgcagcgcagagtttggccactaaggtcgttttggatttgactaaggacccgacggctgaggttcctaagacgtatcttgaggcctacaagaagcttttgaattcggatatggaccacaacgagaagggactttgcatgagcatgcccgacgtggatattttggcctcgaaaatgaagccttatgacccaggacttctattcgccagtctaaggaagctgaaacaggagcttggaagaacatttagaccaactttcactgagatgtacaaaagtttaacactgcgtgagggtcagaaggatgaacttacgaaggaagatatggccagacgctttttgaggaatacagttttcagcttcctggtaagcatgagggatatggagtctgtggaattagcattgaagcattacagagatgctaaggttatgaatgacaagtacaccgcctttgtacagcttatgcacatggagttccaagaccgacagaaagttgtagatgacttttacaactttgcaaacggagacgcagcactggtggacaagtggttcaaggcccaggcagtgtcagaactcgaatcctcgcttgacactgttaaggatttgatgagtcataaggactttgtgctcagtaaccctaacaggttcaactccctagtcacagttttcacctacggtgagaacttccacaaggataacggagaaggttataagttcttgacagactcgattctaaccgtggatccggtaaacccgcatgtgtcagccaggtgttgcactaaactactcaagttcgcaatgctggaacccaaacgctcaggccttatgaaagctcagcttgaaagaatcttcagcacgccaaacatctcacccgatttatacgaaattgccaaaaaaggacttgaattctcataaaccctcattaacttattaatatactaatattctaatattactaatatattaatatattaagagtacattattataatataacaatagcataatataatagtgttgtgtatgtgtttgggataaaattatttaatgattacaaagaactgctttttagcacatcggagtcttaaatatgataaataaaccagaaagccaatgaggtgtgagaaaaagagaagaaagataatgtagtcgatgggatcctgcttaattctctgagaaatgaacttcaagtcccagtaatagtttgaaggagccgagagccgcatttgactcatttttaaaacaaaatcttaaaaacaaacttattaaacttgaaataaattctgagaataacaccacacaacgttacacataaagtaagttttaaaaaattaatttggtcttaaaaaagttaatatgggtgaattttacgattgagattgacagctttgttggcatagttgattaatctttgtttaacgtattcgatgaatatcctggagccagaaacgcaagagtcgaacattaacttgaaatcttccagtgctacttttgacttgtaatccatataaattatctaaaccatgaaattaactcattttattacaggaatactatttttcactaaaataatagtatatttatagttgactggcaattctataaagtactaaaatagtaataccatactaattctacaataagatacgttattgtttgaagaagaaaaggcgatacatagagtggcagttgaggcattgatttccatttgatttgggtctaaaagtgaataatagaataagtgaatacccgttaggacagttgaatctaagtatgaaacggttgaggaggagacgatatctttgagagaaacaccggcgtcaataagtgctaggcctacagcgtttaatactgtcgactttatgctcccgtcgtactcaattacgttgataaaaatggaaattgaactcgtcttgtaacagtgagaaatgatcatttcctggtatgtagactttacggccatagcgaggtccttaattagtctctcgtttggagagtttttaacctttttctcagttgacaataggatttcacagtgtatatcaactttctcctccaatattccatacacattctttgctccctttacttccaactatacatcattacacattatataatatatataatttttaaaatatatgtagtatatataggtggaatgtgtatatactgtatggatataagaaggaacctcagaagggcctttaatgagtacttgaactttatttaatccctgaagaatctcagaaacaccgtcataattaagataatcgacacttgtctcagatccaaagaacaatttagtatttctaggctcatccttcctcctgccatctatcctcaaaccttctatactaatataatcaattctagacattaaagtatcattatttatacactgcaatattaattttacaaattaattatataaatcacagttaattgtctgattaattgtggacgctgatagtatatgttacggccacacattaatgtaaatgataaaatgataaaattattgggaaaaggagttaatgggaattattcagtttttagtcttgacgatgatgtgctttcattctcaagatcgtcttcagctggtcttttatgatcataatcgtcgtcagcttcctcctcctcttcatcctcgtcttcctcgtctaaaattaattaaattaatgttaaacttacagaaatcatcctcctcaacgtccggctgattctcagggtcgaactcatcgtcatcttcatcatcatcactcttatattcagcttcataaaactttttcagcacatctatcaaattatataaattgttataatatactaatagttgaatatatgataatgtgtaataattaccgtcttcttcttctaaatcgcctccttctagatcatcttcatcagcatcgccctcaagatcatcatcaagagcctcgtcagatgagtagttgtactcagcacctgtggaatcaacttggtcaagaacctcaagattaggtaaacactcaaacacaactgctctgtaattcttctcattagccatagggttcatagccagacccaaaacaaccaaatacggcattacactctacaacattatataccataatgtactaaactatattatagtagaacaataataaaggtaataatagtgatagtagatgatacgagtgatttaacgtcatgtggatttttgagatgatttccgcccatttgcagtattttaaggttaggaaagagttttgggatcatagtgaaaacaattgggtctgagatgtagttatcggtgagctcaagaactttcaggctaggcatttcagggaaattagtcagtgaagtcagtccagtcccattcaaagacaatttggacagatttttgaacttttcaagcctttcaccctccttcagcgtgattgtttttatggttgatccgtcaagaatcagctcacggaccttcaaatatactgatgaatcctcgtcttcatcatagccatgttcctccctgaaattcttaagcctattctcaagacacgcgtccatttttacgtctaccctaaacaactattaacacatattttgctaaatatgtactaattatacatagggataaatataactagataatttacataaataatgttataaacactgatgtaaataataggttttaataacataacaatagtattaataaaatacaatagtaagatgatcaaaaacaattaccgaattgtggaataattgaaatgagaaagattgaagtgtataaaatatgttaaagactgacgaattatgcacaataaaagattctaactgaaattgatgaaaaaaatttaatgaattaaagattagggcatagttagtgtgggacaccacaacagacttaaaataattgtctcgtaaactacatatactaatttccatttaataaaatatgaatatattaacacttaattgaaattcagtcaattcttctcaggattcttacgttttaacctaatttaatactaatttccacttaactttttttacaccaataattagctgtattatattaactatatactgtacatagtgtgtgtataactgtcttaaactatacctaagatgtgatggtacaaaatatttggataagggtattttctctttggtttccgcaggttcttccgtcttgtgtgtaacagatggaggtccaacacaggggtttgggaacatcattggtggtggttgcactgggggaggaaacatgttcatttgaggtggcattgtaccgagattcaccattggaaattgaggtggaggtggtactggaggtaaaacccctggcaacaaaggcgatggagtcattggcggtggatttagtgtgtatggaatattggcggctattgtattatcaggtggtctaggagtataattcatcttcccacccatattaacaggattattcttattgtcatacttaatacgcttagccatgttacccttagctatggttttaccctcaactttagtctataacgttgtgtaattaagtgtaatttagtattgtttacctgtaatttgggaatattgttgaaaagctccttagcgaaatcatcgtttggaacttcaggatcgtgaaatcctctcctttccacaggtttcttcttcacttccccctctatttctattacacatttcggtttttcatcatcactagactcctcagaatcacctacatcggtatgcagaaataatgctgtcattatactagtataaagtatgaattacgactaaaatattgataactaataggaatttttaataaatagtttaagttacttgaggaatgaatatcatctgaagactgagattggtctaaaaaaataagttattaaattagataaaattacaattctcttccaaatccttttggtgtttagttttagtgtattgttcccaaagtttttctattttttcctttctctccagcgattcctggtcaatccttccgattattgctatatacaattattatacaattttacccataaaactataagtatgtataataaatagtatgataattagtgtatataggggtaaaaacctttatgtgtgagttcatcgagttccttttttaaattttcagggtcttccagaagcttttttgacgctcgaacctcataccggagttttttcctctaattacattaatttaaaacggttttaaataccttttccttttccttcttctttattctcttgttatacacttccaagggtgttggcatttttatactacattatttacattttacgacattatttagaaatataataaactaaattaatgttaaaattaacttgattgatggaattaaaattaatataaagaaatttaattaaaattaacgattattgtgagtttgaatttgcggcaacactttcactatttggggcttctgataatgattcgctgaaggagtacatggaatctcggtcattttggaagtttttgagctgctttaccaggtcttcaagcctatctttgggtgagtttttgacaactccgagttgttttgccttgaatttgagtgtatctcttacgaatctgagtctgtcctcggtgttttgcatggcaagtgcgtcgtatcgctctgaggcgttaagatggtaatcaaaagctgagtaggctgcgatctgggcgaatccttgatttacattattattaatattgaacttatttagtctatcgtcaatgacgtccatgagtttacttctgtttttgactctaagatgtgcgtaaggctgttgcaaaagctccataatctcagcctccacagtattgcagctgtcgtacaaattaacaatttcatcaacaatcttgggaatattgtcagcgtcgtggagtgctggttcatcttcgtaaggtgataccaaagccttaataaatggctcatccagtaaaactctatttattaatgctcttcctagcactcttcctgtcaccaataggttctctcctgaaccgtcaaccactgtttccttcgatataagctctgcatacactgccaaaggagccagttgcattgattctggactcaaaaagcacatcccaaatatctaaacaattattacacactatataatcatacttaattatagtgtatttgaggatatttaccctatttggtagttaatgtaatgatctaacctgtttatcattaagattatcgagaatggagttgaaagtactttcaacatgttttcctctaaaacgtatagtgtcttcaaagccgatttgtataggattagggttaactgagtattgatcaattagaattggaaagaatgagagaactttgcggcctgggacccactctacaggccattcgttaagtctaccgttagaaacaccaatttcgtaatcttctaccttcaactcactgttaagccctgaacctgttatcaaaggcttctcaccctcttccacatcgtttctcttctcaccatccaagttgttaaccaccgtcttaatgtcaggatttgcaacatttaaagcgctagagtctgtggaattggatggattctttaagtcagttatcgattgccagtcgaaataattattgtcagaactgtcaacctgtgatgtacttgccgttacattgctaagattgtcaatgaaatcaacattttctttttcgagactttcagctgttgatttatagtcatctgtggtactcacacctgttagattctcaggttcaatgtcaaatcctgtatttttactattatacttgaactttgcattatcacatttatgattattataattgtatttaatttgaggattcttgttggaaggtgttaaggacgtagaattgctagaaataaaggtaaattttgggctgagacaggtatgtctggaatccttaaaaatacagtttactcctgaaatatggtttacactcgctgcgatcagaacatttgcgcaaaaaattgaaaaaatcctacacataaacattataatcacatctttaagggttaaaaaatgtgcgattttttattttccagaaattcaaatttgtaacataattaatttaaaagattccatatggcctcccaacaattttttcaaaaaagataatgttatgttatttattatttgaaatgttattataaggtaaataatatataaataatgttatattatgaataaaaaggtggatatgcttatcagtacgcttaatagaattaaggatgtttcattaaaatttaagaatccatcgtttaaccattatttttcaaaaaaggtgaatttatttatattatacaaatttttctatttgtttgttatacgctacttgaaattttagatattttttaaaatactctgaattactataatgattatattttacacatttaaaattattgtgctgatactaatataatttcattaggctgaggattgtctggaaatggtaaataacaagagagagaatttaactgaagaagatgttgagaagctaattaacgaatattctgaacttgaaaatgtattgaatcgacaaactactgttcaaaatttgtattattctgataaaactgatgttgataaataatatcttttagcacatttccattttactttatgaatacagtagtttgtatcgttatgagtgtagtacgtccaaattatgcgtactatatgaatattatgataattatatttttggattagtttttaatttttttaatttggtagtttagctttttattattttaattttttgtaattttaataatttttcattgtatattagcatttttctcccctaattttaaataatttcatcgattatgaaatttcatatttttcaacaaatccataatattttaagaacaaatgttgtaatagtatgttaacaatgtaaattagtgttaaattaaaagtaatatggtggaagataatgatattgaggaatgcgttactccatcaaattcttattattccaattttgtcccagaaaataacagtaatgatagtattaaaggtgttggtgagtttaaggatattgatttgtccgacacttacacacattacaccatcagtgttgagaatagcgccgtgaatggcgggaacaatgagaaggaagggatactggaatatatactagattcaaaattgtatttgaaacaccatgataacttggaattatcgtgtataacagagaatataaacaggaatagtaaggatttcggacacattaatagaattaatcccagtttatccggtttcggcctgggaagtatcagtaaataccacagattgttaattataatctcttttgcactatcatttatatcaaatttcgttggacatttcataagagaacctttgtttaccacaaaggttaatatccaaaagagctttggaagtagcacactacaacttggttacttggatatctcttacctcacgctctatgggattggtcatttagtgactccatttgtattttctcgttcctatgtcattacatttgtgtcaatttttcacctgttcctgtctataacacactttatattatttttagctgagtctctgggctggtttataatgatttatggtgtaactgggttctcctgttcagtgttgtggttgtcaatttataacgatttacacacctggctaccactcaaacataggtttatattactcacaatatggtgttgttcgtcagaattaggtacctaatacactttccatttcctccataacccaccgtccattctatcttacccataaatacatttgttcatttgtcatctacggattattttacacatttagatataattttaactaattaacttcattttatgaataatattatcagttaatcatgatgctgtaggattgagtttgggaacaataatgtgtgctcacattcaaactgagactcggtggaaaatcctatttatgataacatcttttattaactttgttactggagtgttgttattcacgtgttatagaaaaccgccccgtaactctgatgagccaaaccctctcgagttaacggtgcccgaaactaaactcttcgatccagttaacctatcgaaagataatattaacaatatcaagcagtattttaagggcatgcgtgacaataacagtgacgtcagtggagtgtgtaagaacatggtagaaatgagcacgaaggtggtaaagggacatttgaacgttatgaaaagaattaaatacctgtttatatacattttgggatatacttgtttaagatctgccagaaactgctttgcattttggatctcgttttacctcaccactaagctcaaatacagcattaagagtggaatttacgccacctttgtgtttcaaatgggctcctgtttaggttctctagttgccggagcactcagtaaacttctcctcaagaagtatcacttgctttcctgtgccattgcatcacttttcagcttcctcctttgtcctttcatctacttcattgaaccagatagtgtttggaagacgtttacgttcgtttttatcttcggactggccaccaattgtacagacttactaattaccacaagaggactcaaaacactctgtgaatcatctcaaggtattactacttaagtcactctgggaccactattactacatagttaatactggcgtagtagtccagagtagcagttaacactagaatgataatattatgaattgtagaaggagctgaagcggacgattattcggtatctttaggaactacattttcaatttcaacattcttatcggttttatatggatacatttcaacatacatcgcacatcagtatgttcattacacatttatcactataggaaaccactttattagcatataattaactactatattagtatataatgaactactatattaccatataatgagtatagttatgggtgggataagatgtttttatatttatgtgtactgatgttgttatctactggggccttcggagtaccatcaagaaaggaaatcttaggatacatacaatcgattttataatttactgtacaaaactattatatgctatttttaatgtatttttattatttcataatgtaattgtgtttgctaagatgggattttcactgagggatttgatgaaaagggagaaggaatctcggaagagaccaagttccagctccggagaattaaataaagataaaattcagaaaacatcgcaagaaaatgataaatctggctctgtaaaagagaattttaaggacaatttgaaagagaacgtaaaagataattcaaatgtgaaagtaagggatcgtttagaagagaatattccagaaagtgattctaaaccagaaattggacctgaaactagtaaacctgaagtgactccagcaaataaagaagaacctgttaaaattttacctcaaactttgagtgaagattcagcagatttaaacgtagtggaagaaacttatgtactattagacgatgaagactcagttttatcagaaagatcagataacgacgaaaataagtcaaaagttagccaacatgaagtgaaagttgatgaggaaagggctttggatgagaacaggctagtttatgaacaacttaacactgcttattgtagtaatttggagtatgaacacgagagtattttaaaggaagttggtgttgacagtaatttgggccttttagaccagtttgacagtgacaattacggtgattcttctaagaacagtaatgtcatagtgtcgtcgaattttggtgtttcaaatgtttctgtgagtaagagtgagaatttaccagttggtttcttcgatgatgcaaacgttgatgctaaggctcgtggtaaattaactgctaaagaggcaaaggataagattcgtgaactttccaaaaagaggtcaacttaccttgacgaggctagatatgtccaggagaagtctgtggagaatcatcgtgagaagttaaggatggaaaacgaccttctagaccatgaggaaactctgaaattgttgaaaaagaaggtttccgaaattaaaaacactttagttgttgataccagtgatctcaaagttgagcctgagaattccaaaactgatgataaatcactcgaatatgatttagattatgataatctttcatggatgtcacgttccatcatataatatattatatactatacacttacacattagtagtatatagtattatttataaactactgcatgcaaatataagtatactgtaccacatacacatacatatacatatacacttaagctacgaagatatgtataagtgaagtatattggatcctttattggaagcatgtcgatttgacatgttatgtaatctgttgaatattttagcacttttggtaccaaattgtatagctctcttcttaaagttacagcacattctaaggccgttcatataggcgatttccctcaagatccacttgttaatgaagattgacacggatttaccactagaattagataaaaactcagaatttaataaaaggtttgcatcaattcctctgtaaatgttaagacttttaaaccagtttggaggatccagaaagtcaacaattactgcaggattaaagggtaaagttaacatagagtttacgatgttatttgctaaaaacgggtacagtgcattcaaattcctaaaattcaatactcgatcatctcgtccaaaattccgtttccataatctaacaatgtctctaaagaattattattattaattaaatttacataattcaactgctaagtatgtataaatcattgtgtacttgtatatttcctgtgtaaaactatgatcaatgttggaaagagaatattggtcataaattttagctgaaacatgcctgccatagcccccaaacaactcgtcagcaccagttcccattaagacatgacttgtaacagatgtataatctaaactaaaattattttgacgaaactaaccagtgcagtatttgtttaattcagatagaaattcagataaattaatgtttgaatcagattcagcctgcgattcatctaactccataaatacaccacttttaacactattcctataaaactattataactaatcagccggataaatgactactgataattataagggggtaacagtaaaatcggtacttcttggaaatggtaactttgaagttaattgactttaaaattgaaatgtttgacttcatttgactccaatcttttgatttgaaaaactcttttgataggagtttgcccttgagagtgcctgcgtagtacagtgaggctccaatgttgaggtccatgtgagtgttatttgggtaagtcagagcaaatatctcaggctcatctctggagtaatcttcacttgaaacgtcaattaacacaagtctaatatccaaattggggaacaagttaaccaactcttcataactcagtaaagaagttatcctatccggtgctactccaaactcagaaacatcagctgagtctttaaaacaaacattgataagttggtaatatgaaaattttgtctgtgatagagtaattactgagattagggtggaatctaaaccgcctgaaaataatatactaacacactcttttgggcctgatacattacaaatttcttttatactactaatcaattcattgtgtatgttatttattacgtggttcactaagtcatctgttattaaagtctgtggaaattccttccctgtcaacttgtgtatattactcttaggccttaaatacatactcaaatttttaccaaaaagtagtgttatgaacggaggtaactcataacactttccatttgtatttaaggctttatcacttataactacggtcttgttttcagtgttaaaagaaacaagaagtgatttaaaaccataatcatccttcaagatataaatgcgtccagtgtgaagtgagatataaatcagagaaaaagaacctgtgaactgtgataagaagtttaaaacatcataaacactgttgatacatagtttttgcgtttgattaccaggtgaaaaattgccataaagtgctaaaatacataaattacaaatctttacaatcttactacattttatacttaaattaaaaacatcggattcgaaatccaaagtgttgcgtgatgaagataatttacagttttctatattacaagatgagaataaaccatcatttgaattatttatggaagaatcatgttcaagagcaacctcattaaatttagctaatttacattcaatttcagaagcatcaaacctttcatcttttaccctaaattcagcctcaatatactcatttccgtccattatctgaaaacttgtataggcttggttctagccttttgagggctatttttacccttaactacagaagaatatgaggaaaacttggtctgagagaataagcatgaattaacgacatcataaaaatttttcaagaatctagtctaattttaacacatgattgagatattattttatcagggccaaatatataatttacactggaatagcatgtaaaatgggcgaaattgtggttggatgtgctggaagaaatttgttgggtatgagcgtcggttaatgtgataaatatcgaatgtgtgttttaatagaaaataaattttaatatgaatttatctaattttcaagattggatagttttgtaacatattttcgccctattgcaatagaccaattttatacctttttatttttgtctatcgattaaattattaataattggaattctccaacacattaaattatttttatcaatttttaacttaattgcccatttctgtcactaccaaacaaccgtataaagcgctgaagggtaaaatgaaatagatttgttataatgagtgattcactaaaaattaaaagggagccagttgatagtatttcatctgccgacttgtcgaacaatactccgagtgaaagaagggtgactttggaacaagtggtaagatgcgccgacgataaacggaaatatgaacttttgaccctattttccgttgaattgttgaagttggaatccgtcgagatcgacgaatttttttctgccctaactctcctaaagttgctgattccccctcaaaacttactcaacaccaataacaacgttttggaaaaaacatcagaaattctgcttcaatatgttaagatattgagattgaatagcgagttcgatgaagtttggggtggaattaaggactgtaacaagttgttccagatgtacaaattgatacacgaagaaggttgtaactatctcctacccaacgtaaaggctggagagtttttcaataaatttctctgtcaactgatttcctccagttcgtcagtttcatttttctactctgttgttatgttgtacaggggtaaaattgaggagatattctcaaagtataagggaaataacgttagcactgaggatgtaagagtgataatatcaataatgaagaccctgttaaccgttacaaaagcatttggatcaccgccagcacccagagaattattatgctcagtttcaataagtgtgcttaagaataccaaggcacatttatgcactttgtacagctataacttactggcattcctgatcaaagatgttactgacaaatcgcttctcgataaactattcaatggactcagttcccttcaaattgatcaagttacttcactcgttaaagaatgtaattccctagcgaatacctctacatggaaattcaaacataccttcaataccaccactgaaaatactgttaataataatagtactaataataacattgcaactgttactaatgctaataccacctttaggaaaaataataattctatgaataatgctagcaatgaacatatggtggaatccgtgaaaagaaaacttaatgctgttgataataatatggatagtaataagaggaaaaagaaggatgtcccggagttaccagtgaattggtacaaagagctgatgagcaagtttgaaacgaatagaggggagggaaagagcatggtggtggacaaaaatgcatggaagtggaagaatgacgcactgacaaacaccttgaaaatggtcgaaggtgtggagagcgtagatttacagccagttgaggcccagttcatatctttgtttgaaggtttgttcaagtatgaatctgcaattccagtggtgattaactcgttaaacctgtatagagtgttgctggttaagggaaactgtgattttttgagcggtggaaagtcacaattgctggcagagttactctttgaaaagctcaaggaaagtaatcggaaggttagggacgcctgtgtaatggctttagtagagtcggttaaaaggtgtagacttgcagtactgtcagactctattaaaaagtcaacactaaatatctctccaacctgtagagaaaacttatataactttctcaattgtaaattggtgtcctatctagaccatgagtttgttcagaaactgcaacagctgttaaatagtgtatcagaataccttaaagggttagagaatgataaagtaccaaaagttagaatggcatataacgcactagttgccgttttggatgattttaacctcatctacaacaatatttccaccatctccactagtagtaccgttgttactgaagctagtaaaccagttcaagaagacaatggtaaaccggcacaagaacaggttagtaaattgcctaaagaagttcccaaattagttagagacgtttctagtaaacctacacaacaagttcatagtgaatcaacgcaacaagatgttactaagcctagagaagaggaggctgaaaagagtaatttggattgtacaacaacggcagattcatctgccacgtcagaagagtttaccagtgctggggttcctgaaggtgttccggaagttgaggttttggatagtgttttaatgggcttgttggataatttgacacatatagttgacaccaatattcttgcaacttttaagaaatatggtagcgaaggaagtaatagagtgctggaagatggattgagacaattgagtgtgtggctgagaggaaatgaaaaattgttaaaatcagttgattactacgttgtcaagctgattagttatttgtatagcaagttcacaaatgttgaacttttgcaggagttttttaaccaactattgaattatcagttgactgatgaggcgtttaatgagctggttgaagtaattaaagttaacaacgctttaaagttactaaatacactactgtcgaaggataacgctaatacaaacaagctgttaaatccactaaacgcatattattataaagattccacttgtttaacacattttatttccattctacaccaatacttttcacagagctatgtcaagttaccctcaagtgtaatggtgaaggtggttaactttgtagtatataatgttaagtcgaaattatatatagtgggtaggatgtcactggaattgttgagtgcaatgaatgagaggagtgaagtggtttgttatttggacaaacacctgagaaacacactgttgtatttgaagccgtcagataccgtcaaaaacgcatgtaaggaaagtcaaacaagagttgaaaaatacgtctccaaagacctgttcaactgcatgttcaaagataaatccaacattaaaaggtgtttatagtttatatagttactattcatatagttactatttacacagttaattattttatagtgtgttggtaattaaatgttaataggtcatgtgaatattggaagcgctttttatcgaaaagagatgaaaaatctgataacatgttgttggggaaagcaagaaaagatttaacatcttggctctcttacacgtatttaccacttaatttctaataacttagctatgttgctcaaaattagttttattttatttatttttccatattagcgttgaattttatttacaatgttgtagaatgtatgaaatgaagtgcgagaaggtggttttggagatatttgatataatggcggattacatgtcattgaagtgtgagtttgacgaggaggagagtttgttgctgctgagtgcatttgtaagttacagcttctttggcaagtatcaattaaaggcattgtccgtgttcagcaagctggttaagctgtttaggaattcatttgagtccttggaatttttatttggagctgtagataactgcagtgaaaagtggcagcagctgatgagcgaagccttggttagattagtgcgtaacgccacacccacagaatcgctagtacaatttcttaaacggaaattagattcctgtttcactctggagagtacacataaaagactcatttatcagtggattaataatttcacaagcccaattcttaatactaataacctggttgtttgtggtaacactgttgatacagttgatagggttagtagtgttagcacactggacagagttccgagcgttagtaatgttaatacacttaacccagctgttaatgttaatagactggagagtaccagtacacttgatagtcttggtagtgttgatactgttgatacagttaatagggtcgagagtgctaatacagttaatagagttgattatatgaatactgttagtggtttagagaatgtcaatacggttcccgtagtggataattcagaattaaatagaatggaaacagtttgtgaggattatgagcaggccattgaaccactaagcacaacaggctcagcctcagatgctcaattcccaatacaatatacttctaactttgtaaccgtctcaatacaaaccgatgattcccccattaacactagtaatactgttgacagagttgatagagttgatagagttgatagagttgatagagttgatagagttgatagagttgatagagatgacactagtaattccaatagtactgtagaaaatgttgatccagtagttacagttaagaatgttggtaaagttgatgtggttaaggaaatggatatggaaagtgctttcgaaaaatcctttgaaaaaacatttgaacaaacttttgaaaaaatcgattgtgggaatttcgacaaaaacatcagtgcactacgtcattctgtaaaaaacaaatctgtagtattagataatcctgatactactactgacagagttgataacagcaaggatactacagttgacaaggatgagggttctgttgtcacgagtttacagttacccaacaatactccagaggctactaccactcatgatactgtggttaaagatacgtctgttagtgttatgggtaaagaaccccctattaatatggtggataaacgtgttgattcagtggaaaaggagaaaatgaatgaccaagtgatacttgacgaggatgtcacaaatgacgttgagtcttgcaagtcactcgctaagcaaataatctcctcaaattctccaccctcaaatactcgaaaatccaacaccgttacactagatagcgtttccttcgatagtgtttcattcgatacgtctaacgttcacatagttaatgagaatgtcggtgttgaaaattctgctcttaatagtgctagtctggtcaatgttgatgttgaggatggggagttttatgaagaaaacggtgaagtgactacaattagttgtacaagcagatataaccagtgtaattccccaataaacattattaacactgttaacactagtgatactgctaccaacaccacaaactcggttgatccggttaacactggtaacagggtagataatatggtagagaatttggaagaggagggatcagacgagagttatcctagtgtggtggtggagtatgatagcgattcagaactggcgtgtggagatgactttagcctaagtttagtagaatcggtcctgtcgcactgctcaaaggtgaataagatttgtctagtctcaagttataaggagtacaagagcctgtcaagcaccctgtgtcaggaggacgttgcaaaggtgtgccttgacagctgttcggagattttaaagtataaaaatgtcctaaagtacctggcagtaccactggtagaaatgacccacaacgccatactactcatgacgaaacgcatcatcgattccactctagcacgtgataacacccatgatacctttgtagaaccactaatactcaccattgaggtaccttttacattatttatttatatacattattaatactatacctatacattattaatactatagtaatactataccaatacattattaatactatagtaatactatactagtaatataagaataataatgtgataggtgtttaagagtataacgatggagttgaatgagaattttatactgcagttttgtaatgtagtgacaaacttgctatcgcttccaaaacaactttttcaaaacgtatcaaagtttatatttagttataaattagtgattaagtcatttaatggaagtattcttaaaatgtgtttaggaaagattatattgtataacaagttcactagtgtcggaaaacggattaaaacaatcgaatcacatcatgtaatacaataacacatttaacttagtgttattcagctattaatttattattatttaggtataatttatcctaattagtaataaaaatagctaaaatagtactagtgactgggtaaatttgtgtaaaaaatgtgtagaagtaagatgctgatggtgatggtggagttgagcatggaatcgctgaaaggagaagtggatagacttttaatggccaaattgagattcacgaaaatactgcaaatgcaactactcatcaactcatcgcaaaacaactcgacaagcatagttaacacttctaataacagtaacaatgttggaaacaccagtaatattggtagtaacagagtaaatagtggaagaatggaggataaggaggaaagcggagggatgaacgagttgaaaagcgtccatgtggactttattgaaaggttggagaaattcgctaataaaagcagcgcacacagcgtggaaaaggtaatacaaacctcaaactacattatcagcacaatctgattttaaactttaatctttttttttacaccataatccaagttcatgtcactacagtcagtgtatttctttaaggtttaattcttcggatttaatcgtcattttattaaaataattaaaattttaattaaatagaaatccagttgaagttgcaaggtttgtgtcaaacctgaaaaaattctcgaaagtcaagtcattcatgaaatagaaaatttttcgaaatatctaagatttaagatttaaactgcttaaactcacagaaatctagtgaaaacgtgataaaattgtaaaaaactacgttcaaatattctggaaaaatacaggatacaaagtctattttcccaagatattgatataatttttaaaatttttgttaaaatttggttgaaatttttaattcagattaaaaaataaccaaatttttgcctataaattgaataaatttcagttaaaagttaactgaattccgaaaagttaaaatttgaaagaataagggataaaataaaatattttttactaaaattacattttaaaagtttggttaagtaagtaatttaaccgtaaaactgcaattctctcgatattataaaatatactagagataatatacgatttaaagactctttgtatactagggttgtactgattttaaatttaaggtttaatttttgatttcttttaaactgattgctttgttgtctgccgtgtctttaacagtagtttcacccttaaattgtgtaaattcgggctagactgagatattaatacgatttcgttagactccgacgtatccccacacatcagcaaggaagcttttccgggaatttaataccattatatcgcacagatatattagtatgtaattaacatgttgcttttagtcaaattattgctactgttcgggcttttggctgcccggccgccagtacactcagtaacactcgagctgactgagttggacaacgacttctccaagaccacgctatcctacttcgtctcatcaacaatggtgagatttgacgtgaaggacgacaaggtggtcgataaagtgaccctggacaacttaagtgtttggagccccccagacgacactgagaagttgagatgtgcaaaagtaatatataacgaatttggccctagactagttctgctggattctaaaagtaagtatggaaaacatgaactgttatactacatatataccctcaacggatgggtcttgttgaacagtgtaaacccgtttaatatttctttacaagaaaatgaagttgaaaaggaacataaatcgccattacatttggttaatggagatgtttacactaattttactcataaacttggcaaaactgatggtaccgttgatacagttaagaattcagttgtcaagactcaacaattacctaaagcagttgatagtggtaaaagcagtgatttgagtagtttggtattagctacaactacatctggtaacacatctgttaatactgttaacagtagtaatactgttgatggcgttgatggcgttgatatattcggaatttcaggtgttgacttgtcgaatgtgcctgagcccccagtgtgtcgtaagtgtacgtatgtcgtggacgggatattgtatacaatacactatttccattttaaaactaagtttagaagggtgtactacgaagggcagcagttgtacgaagtgccaaaggggaagcacctttcgggttcctgcgtttactctaggaattctaaggtcattttcgttgattttcttctgtcaagccccggaaagacccatttcgtgtacttcgaacatacctccgctgggtttgttaagctgccaaaagaagaatttaatgaaagattgcagaagtacaagtccattccaacaacagtggacctctcaacatttaactctaaaacatactcagtcaccacttcgaagaggttgaataagcgtaaaatggatgaatcagtatctaaagtggactgtatgttatatactccaaatgatggatatgtgataagaagagtaatagacggggatttattggtgttggagagtgataacgacattttggaagtgttatactacaatttgggaggacagaaattattaagtatgatattgcaggaaggagcaaacttccaatatgagtattacacttactttggagacttaggaaaatggtcaaaatcgtcagagtacttttactacaagttaatcgatgaatatgttaagaaaagcgagggcaaattctcactagacctgaagaccaccactaacaacaagtatttgatagtacaaaaagacggctttttaaaccatctgagttactttccaaccacaagcgctttggttaatgttgtttacgatcatggcagacttgtttggactgccaggaaaccgcgcgagtcctgcatattcgtctggcaccagtacctgtataacttggtctacgtggtttccacctgcgatggccagcacactaactatcattaccagaaaaatggagaaacctggtcctttatcgcttacgaagagtttaggcgccgtttctccttcatctactccaccaacgacgttttggacttgaaggataactttgtcgggtttgatgtcacggagaacggaaacgccttcacaattaagcctaagcacttccacctcataagcaaggtgacttatggctctgtcgtactctggaattccttgccaaacttaaagtgcttttcagctaagatcatatatggcgctaactcaacccaggcttacctctacctaaaggattacgaaggccgcacattcactactctttataaaactgtagataacgatttcactaaatgggagttatcgtactccgaaactgctactctcgatgaagttggtactctcccaactaatgttaaggtagagaactttaaggataaagtagaaaataaagtagaggattcagtcggaaatgcacttgaaaatgcagagaagttagagaaactagagtacaggttagagaaattggaggacaatttagagaaagtggaggagaaatctgataatgccaccgttgatactactgataaagtggaggaaaatgcggagaaagaagataaattagatagtaagcttgagcttactgataaagtagaaaatagagatgaaaatacactcgaaaatactgttgataaagatgaaaatagagatgataatacagtagaaaatactgttgataaagttgataatacacttgaaaacactcttgataaagatgaaaatacagttgaaaatactgttgataaattagatagtaagcttgaggctactgacaaagtagatgataaggctgatgttgataaatctgttgagacagtagaaactactgttgataatggtgataaagttgttgaaacagttgaaagtattgttaaattggttgatgtagttgacgggtatttgggtggagtatttgatttacaaaaaatgaagaaaacggagtacggagattatgttgatgccagaaagtatggcttaaattatttgttgtttacacctcaccccggttacccagtgagggatttgagagatggacttgaaaccatatggaagtcttccacacaagagtgcgttgcgctctcagttttcctaagggacgatgccccagtcatggtagaactgtttgtcaaatgcagtgtggaagtctcgaggaaattcttccaacttaaatttaatcgctggtaccctgtagactcacacacatacgacatactaacagattcactacaaaactgatactataatagtattagtaacatagtgtaacataatgcttaaggatactataatcctgaaaacaatatcaatgaataaaatttaagaattggaaatatcaattcgaaattctcaaatcgagataacatacacacataatttcatatacatacgttttacatattataatactaattttaatgctaaatgccacattaagattatttaaatttgaattagcattaaattaatagattatcactaaaataaaactaaaattacaccaaaatgacgttaaaatagtactaaattgaccccaattgggggtagattaaaaatatttatgtgtaaattgagtgtaaatatttgtggatatcattggaaggtgaaattggtagttgtgatttgattgaggagtaagaggtcttgagtctagactcagaaatgccccaaaagagatgcgaatcctcagaaccagagagtctcagacacttgcaagggtttgtggcggagtcctcatgagatccgccactagcaccagtttcataatgtctgccaaactttaaacttttaacgagaaaattgtataaacatttgggaaacaaaatgccatagacgtttaggattgaaatgtgtttgaagcgttgagtcgtgttggttccaggaaatgggaagttaaaggcatgagaaagtaaacgaaggaaaagaattttacagagctcagattgagcttttggcggaaggtttgggtcacaccaaacacctttaatacagtgttcttcagggtccagtaattgaacaacgccgcctgccagtgggattattgatgttacctcagattcagcaaccgcgttaccaagtaatttacaaccaataattaaaataaatccaacagataaaggatcacaaatcatcttcaataactaatcaaatatcaatcaaaactattatataattaatagtataattaatagtatagttaatagtaagatgaatattacctcaaaaatactatttgcgatttcttcgggagtgtgaatttcagtgaatgaatcaacttcctcaagagatttgtccattagcctagtgcttcttttattcagaactcgctcctccacgttccgtttatataccgtatcatacacatttatatacttgttataatccaacatgtttttattggtcttagattttgaaatagtgttaccagtgtcaacagtgttaggagtggcaactgtagtgtcaactgcattaagagtagcattagtggtatgagaattgatgagattaataatgtgtaaaagagtgtggtaaagttgacccttggagagataagaggagtttgaaagtaatttggaaagtaaacatttttgagttaaaatattatcatcagtaaaaggcagcggaagaacataagttaataaatccagctcatttaagtatttattagtgtaattaattaattcaacgatcaagttcatcaaatcacaaaaatatattaaaggttataaatttatctataaggtctaaattatatagaacatctacatgtgaattaacagtatttaaaaaaatagaaaaattaaactaactgtaacacgatagggaaaaggttatggtgtggaatccagacgaaacagttttaaaaaataaaaaagtaagtttaaaattgttaaaatcactttattgagttactaatgggattaggggagagcttaaaaaatatcgcattgtttcccctcaaatttctaaggtataaaacggcaagtaatgtgaagagggaacgagtaattaaactgggtattttgtgcaggaaatcatgggttcttttcccaccaattatgctatatcaatacctacgacaagtatggtcaattatacacaattctaccaatattacactattatacaactaatagtaataatgttataatgtgtttgtagactgacagggatcattttacaactgagttgttttataagaattcatcaagtgatgattcaaaggcattttatgacccagacaaacctaaacacttgaggaattggaaaatacaaagtgatctcgcactgctctcactagtcgcaaatcaaaaattcaatcaaaccgaagaaaacgatgaataaacatgtataacacatttttcagtttttaaattattttagaattttttaatattttacccttttctcattttttacaattttctacgattcttcttcatcacctgacaactcttttcaacaacaatttaaattaaagtaatattccagtttaaatttaacattttgtttaaaatttaatactttctgtaaattttaatgattttgtgtaaaattcgaaaaatttaatgttgtatgaaattgtgtaaaagagttgatgttgttgtttttgttgataattaacacattttgtaaaatcatatacacatttgatgtaaacgacgtttccaacaaattatacagggaaattagtaaaaacttcacaattcaacataaatcgcagactgacaaacaatttcagttaaatcctaaatgtaaccttcaattaatactttttatcattattaataccattaatagtagttatatatttagtatagtagtattcttgtatcatacgattatagatgttaagagagtagagttggtattacgtgagaaatatggcggtaagcccaaattatattaattattaccgattttagggaaagaagttaactactttcggtaaatttaagtcaactaattccatgttcagacaaatgctaaatgattactatcagaagtattatatatactataaattctatactttacactatacctcttatatgtatgtttattagggataaagaggatgtaaagatatttgatgactcattacaagtaatttttaacagagtaaatcaaattttagaatcatataactaataattttaatgaagattatgttaatgattatagtaaacttgatgatcatcaggtcagcttttacacaatttaccaccctatcaatacttatagttgtacaaatatgataaagtatagtaataatggtataggagtctggaaatgagttggaaacagcacgtgtaataataaggctgataaaaagagaatttgagaaggtaatttttccaaaccatttatatatgttttagtttgagaatgtgaaaaatgagtgtatagttccgaatttgggaaggttttctcagattcggagtcttgctagggatttacctgttccctcaggtactgacacaccttgtagaactcaagcatcctgtgataagcttgcaatgctaatgaacctctgctcctatatcaggacaggagttggcttcgcttatgacatttacgctacaatgattcacgtcctagggaacatgttatctgttctttgtggttgtatttttgtcggaccagcacatgtctgtctactaaagaattttccggtattccattaataatcttaacgcccttctgggaacttagttttactatttattcatttttatacccttaattatgctattattagtactattttactattaaatagtacttgtagtatatatatagttgggatagtgttaataattgagtagtacacttgtaggataccgtatcctgcttttagtcagttgtttcaagcgacatatggtatttgggaactggtattttaacaatcaccccagtgtaaatcattgtttaggttaagataacaactaatttatgtcgtatttacggaggtaactaccaccttatcactcttttgcagatatcggatttagctcaatcttctcctaatcttttctaaatactataattgatattatacaatatgtatatgtatagtagtgttagtatagtttgtatgtagtataatatatatacagagtcacgataccatagggaatatacatacatgtatattaggtatagtatatatagtgtatggataggcaaaaagattaagcttcatctacgtttcctttttcactgacgtaaatgccgtcgaggaattgtctaatgtcctttttcctgacaagtgatgactgatgtattagggcggctgaacgtgacactgattcgacatcaactccagtcaagaccagttcatccttgacagattctgactttgtgacgtgaactccaggtaaaactctgacaactctgagcttcttttcacccaaaaagttcctaatctcaaccacctttccatcatcactcacatttgagttgattgggaaatgagcatgaacgagcctcatcttgtactggtattttctactaacacctgtcatcatgttttcaatgtgagatagacatgttctaagggcggcgattttactcctggagccaaaccaaagccttactaccactgacttcttatctttagacaatgataaatctatcggtaaatgggtaaaacttctcgttaattcgccatattttccctttactgtcacccttctcgatttcacgtcaacactcactaaattcattattatatcccaaaacagtaaatgtaacaatttacgtatctaatatatttatatggtataatttgtagtataattgatatatgtaaaaatagtatagtttttagaaccttctggagggattttaaggacctgagatgtaaataaactcttcatatttaaaaaaataaaaataagtttatatttaaaaaaatactagtgatatcatggaaccaacccccaccacacaaataacagtaacaatataataaaaacgtaataaacagtgtgataaattaataaagaattgggacaggaatataacctgtgccacaagctgttggattatgtattacatatttcccaactactcttttcttatccactccataaggccatttcgcacttatcacgtcggaactactttttggcactaaaatcaaattaattatcattattatagtattattataatatcaataatattattgtgttaactatgtatataatctggataatttgggagaagaatacaattatgatcggttggcgtttgtgtaattggatgtctcgtatatgcgatttttttcccagatggtagtttaataggtctgggtctaaatcttcctaaacagagttaaaaaacactaaaactgaccccaccaaagcttctgtcggattaagaacttgcatctatctccatccacaccaatcagacttacagcctaatcataccatatagtactgatattatttctattattaataatatcactaaatatttaagaattttagggtgttttaaaaaagtgtaaactcgtgacaagaaattatataacttggtattagtagtgtataactgtctaaaaaatgcttaaaaatatactttggagcgatttcttgaatctggagttgagaataacacacatttgagttctaaaaagtttattaaaataatgttcattactgaggaattcacaggtgtgttgataaagcttgaaatcttgttgatataactttttcatgagtttatgtcttcggctaaggaggattgacattgccctttttctactattgtcccgagggtgccgtatcaaatgactcctcaaatttaaaatcttctcactcacacatcctactactcaaattaccacaagtatataagaatatttgtatcaatagaaacactttttaatattagttaagatataaacaactgtaactatatgagcagtgtgtaactagtgtaggaagcagaaggatctgacagcaaggcagtacattgtacacttagcgatccagtatcaaatggttccttttgtaaatgtttcataatcatgaatgtccttgcccttctaatttccctgccactggcacatcttaaactcaggattttcctaaccctttcgtcaagatttgccaagtctaattcgttccacctgccaacgtaaccagttggaatctgagctctttcggagaggaactcagattcagcgcgtttgtaccactcagtctttggagccttaaccttctcaaagggtaaacccttaattctaaacaccttcacatttgatatgtataatttagaagttttcaaataattccaatttataacattccttacactaaacatttcacttacacatttttacaatttttatatatcgtattttaatcattaaaattttaatataataattaaacataaataataattaagtaaaaaatgttaaataataataattgagaaagtccaaagttaaggaagaattgtggtgaccaaattaataatattataacaaattgtaaaataatgtgatggaatgtataataagggaactggaattgttattattggatccttgtaatgatttaaatgattcaagaattgataaaatcaaacaaacttcagaaaataatgtaattgataaagtaaataagattattgaccttatattatctgtaaaaaatgtagatttatattcgagtttaatattattggaggaattatttggaaaacctgttctcataaattgtaatataactttatgggataaaagcaactatttcaattatataaatgacagttttactagttttctggaaaattcgaatgattttatcgatttccaacttaactctttcgttttactatgtaccatagtcttgtgtattaatgtagtcgtcagggctaattggataggcccgaaattttctctgcaaaatagccaaaaaactctttcagaccactttcgacatcatattactcagcaagaaaatggcaacacatgtgcaaattctgatggattcggtgaaaaaacttcaatttcgaggcaaaacatagagttgataaaaaatttggatgttaacaacagtgagaaatgttatttattagggaaattgtatgaagatttatgtggaaaggtggttttaaaatcaccagaactcacattaacagattcggatttggatgaaaagagtaaagaattcctgaaacaattgttaaatgaatttgtaattgacggtgaaactgtttatgagggcaccttagctctacaatatctctacacttctatcatactactacatttattggatgagtacatctataaaaatgaaaaagctcacggaaacagtgttaattcatcagcaaaagatacttctaaggtggacatattgaagagtaaagagatttggagaaacagaattggatatatttatcaattaataattgaggattccggattaatattatgtccaactctttatcattgttcaattactaactttttacattttcttacactatcacaagtctccacataatttacttagttattacacactttttacatagttattcaattatttactagttaatataatgtagtaataattttataggtgatggatgaagagtttagtgtatttaatattgatgtaactaacaccgatgtgagttatgtgaagaatgtgttaatgagaaatgttgatgttggaatggaatttgatgattattttaagtcattgttactaattgagctattacagagattaccaatttataatctgaataggctctatgaacctgtttcacaaaaattaactaattatcttaacttcagcttcgaattcactggaaaacttggtattagacgtaaatttcaatccttttcaataccacagcttgttatttcctactctaagccattttctacccactcatctactgtgtcaaattcattacaatctaacaaaagtgtggaaaattcagaaattgacaaaagtttgggaaattcagaaataaatggaaagttggaagacaaaataagtgttgggttgaatgagataaatgaggagaatgatatatttgagacaccaagattagatgaggatgagaatagtgaagatttgaatgatttggagcagctattcttactttcaaggggtttgaacataatagcaaccacttcacaacatgaccaactctcactacaattcctaaacacgatctcaagcactattattcaacgtattttcaatattaattaatagtatagttatatataattaagtattgactctatagcatatttatatagagagtaagaagaagagattgataatgttaatgagtttatggttgagatgtaaaactgaatataatcgtactaaaaccattgaaagagctacaatgcagttaaacaatatactaaagtcttattatggtactgcgttactgtcttgtccccttctgaggattcattatacacttatttacgtagttattagtatggtgctaatatgtattatagatgacgggaatagaaacgagtactttttccagatttcgtatcccgcaatttggaacattaaacgtgaaatcggtaagtttcaactctaattaccctatcgaacgtatatactgtgttaatggtgtttagggaagtatatgtttatgattggatcaataacaacggtaataaatagtgtagttaacgatgaaataggcctgtaatatgtataaggaattacacatgtgggaagatgttatcaaatgcctaatattaacacaacagaaacaacaagccactgaactcgtaacttcatactataccatactattactgcactatcaacgattccaatgttaacaatgttttagattaatgaaagaataaaaatcatggcaacacctctgttatattgttttctagctgatatttcaaatgacatacaacattatcatactgcatggtactaccaaatattgatattttgaccctaacattaactagtataattatatgtacgttagtattcataactctatttcacatgtgatagggaactgagtaatgagaggtgtggcagagccgtaagatcaataggcgttaagtattataatgatggtgactatgagaaggctttggagtatttggagaagtcgttgcagttgaatccgatgaatgagagtgtccagtttttagttggatgctgttacttgaagagtttgaaaattgaaagcgcaatcacagcattctcacgtgtcgtttcaattaatcctgacaactccgatgcctgggctaatatctcttcagcacactttaaggtatccctcgttgtgcttggtgtccctttctggagtcatagtcttacttgttcacacagatatagtatagttattgttattgttattgttatagtcatagtggtattagtatacctaaacacttttatcggtgatgaaaaatgttatagatgaagaattaccaaagtgcgaagatagcgataacgcaggctttaaagaacaataacacacgctggcagttttgggatattctactcagaatctcagctaacgtatcttttacacatgattattagtgttaatgttattttagttaaacgatgtcaagtacacctgcaactgcatacaaacactcattaatctcggaatggtaccactttactcagttaactaccaccaaactccggtgctattaagatactattagtatactgctagtgattattgtgttattgtaatattttagaaggataagatcgaggtatggatggtgaagtatctggttgattcatctggtgatgagttgaattcgtcagttgttgaagagactttgaggctgattgttagtaatataacagagagtgcgggtgtttggtcagagtactcaaggtacttgagtagcaagaaagactacgtcggagcactggagtcaaaatttaaacaataccgcaaagttgaacaaaatatacaaataaaccttaataacactaatgaccagttaaatggatctcatgagaagtttaaccctttggaattggagctggttgaagtattgcgttcaatggtagagttggtgaacaaagttgatgatgacggttataaggaaagggtgcttgactcattaaatgggataaaactgagaattctcaagagggctccagaagataatcaacttcacgttaaccaaatcaatgacttaattaatcttctaaaacattgattcgttaattctatatttagtactactacactaatttctccactccattttctgtatatttcttatactaatctctccggcacattttctgtatattgttagttccaatctctccattcctttttctgtatattgttactactaatctatctggtacattatctgtataaaaaattagctaaattatagtatttatattaaaaacagtacatttagtgagttgtgaaagaagtggtaaaagtgctcgtgtgagtcagtgaaaaatcagttaataaaaataacaaaaatggcatataatttgtacgagaatgaatacgcaattttagataaaatcgatcccttatcgagagttttcatcttaaatataccaacacatgtcaacacggtataactctgcacagttactctaattacaagattatatactaataatattagtaatatatagttaaatacgttataatcagtcgtgtataattatctaaattatatacttaaaatatagctaagtatatgacatagttattataatatagtagttggaggaggtttataatttataggagacattgaggaagagatttgaaaagtatggtgatgtggagttgtacacatgccagaattgtgaaaacgacaaaggctgggcatttgtaggttataaatcccgaagaagcgtcaaaagactaatgcgcaaaattctaaggaaacaaaaaagcaactaaccaattctacaaactacctaaaacagtgcttaacatagtttattatcattcaattttccataatcttaatgttatattttttataatactctaatttaatattactatataccgttatatatcgtacagaatttacagtataatacatgtgtatggtatggtagcataaaatagtcttatattgtaagtttgatttaaaaaattaaagttggtcaacgattagaattccttgggagggcggtttaaatttgtttggcttcagctgcgtattcttcttgggatcatacaaattcgataggtgatctaaatttgctcttttaagtattggtaacgcctttcctttacaccttatgaaacaacactgaactctagaacctgtaggagttgtaaagattttgtgaccaaaggacagggtttgtagggtattttcatctgggaactgtaacgacatgatcttcgagggtttgtggtacatgcacttcactccaaactcacccaaactcttggccaccatgttagcctcctcttggctataaatataggcgcaaacgtatattaatgtgcctcgaggcttaccattggcgccagggttcgaaccagcactagaaatatttgtatttattgtggtactgacaggcgagtttgagttgtaaggtgggcttggatttgaagttgttaagacagataacaagtcaatagtatcattcttaactctactgactgtggctggtgaatttaataattctgtcgtaaaggtgtaggaaatggcctctgagtaaattctccagcctgagggatccgggcacagtctcatggttgaagggtatgcctggatcaatgaggtacccaaaactgaccagaacttaagtgcgtaatcttcactctcaaatagtattaatcccaacccctctggcacgtcatttggtacaaacttcctaccatcttgagaatcatttgatggaaactttttaccctcttctgggtttaaactgactggaaagtacggtggaatttcgtttacagcatttgtgccgtcaccaaagagcaaaaagaacttcttaatcccaagactttgacagtctttcttaaacgtggatttcaattgcaaacgattaatgtcatcagactcaagatcactctcatattcatcacacaatatctctaaaccaaggattaatggtatggtataagagtaatcagttaattttgtcttggataactaaatataattagtaaaatttggataactaaatataattagtgaaaatggttacgttgtgagttggtgagtttaaaatgtgaaccgataagatgtgagaggacctgatttggagtccaattcctaggaattccaatcaacattaataccaacgatcctgcaacaatcatttagaactgtagattatatcaaatttagtgttaaattacgtaatataacactaattaggaataattgtggtataaaatagtactaatttaacgcttaaagtaagcataatatacagtaaattgagtaataacttaaaatacctttaagccaccactcatcattaattttaggtcttggtgataaaagagatccatttattctttcaagaggtgttttaaaaaattgatcaaacgtgtaaacagagtcgtatttgacctttaaagtgaaccttggagagtctaaagtactctcaagagatacgttggaatttagcgttggaatctcaaatttcgttaccatctttgagccgtaaagttgatctgtaagcctaggatcagggccgaattctttatactttccttcattcattttattttcgtaatattgtacaaatgtcagtggagtttcacttttatcctgtttatctgatttattggatttattggggaatttactatcattgagattacgggtgtttgttgggggttcgaaaggcggtaacggagggggagaaaacttatttgatgggctgtgaacgtcagataatggagttctgggactattaatttcctcatttacgacagtctcacgacgtttactacgtccgatttctgattttttatccctaccgctgtgactgtgtgaactgtatttatgggattttttccttgaattttcgtaatcttggtaatatcttctcttctcacccctgtagttatcccttttataattttccgacttattgtagttgtcggattttttattaaaatctcttttcaaatgtttttcattataatgatcagatttgctataattttctgatttattgtagttatccgatttattataatctgatttatagttttctgacttattataattatcagatttattataattttccgacttattatagttgtcggactttttattaaaatctcttttcaaatgtttatcagaattgtgtttattgttaaaattaaagtttatattatgggaatgattggaatcgttatggtctcttggccttggattattatcagaaggtttgtaagggaatttatgagattgcgatgctttcgactcatttattcttttatcttcgtccattcgaggattcggcgatctccacattatgtcaaattttaaacatgattttataaaattcctccaattttatcataatactatataacagaatataaaggtacttaatggcatatagtgatatacacaacactataaacagatggaattagtgtaaatagagtgttattaggaataaattaataaattaatctttgaaaaaattttacttttaaaagtattacaattactctgttttacatctttttatccatattacccattattacataatattttccattattatatgatattttagattagtgatttgctaggaagagactaattttttttatgtttataattaattttatttaaactataaaatggccatggcacagcacatacctataaaaacattacaacaacattgatgaaataatatttgaatgataattcaataatgataattaattgtttagtgaatatgtaaaaggtggttaccagaatgctaacggcggtgccagctgcaatgaacttaagggtggataggaaggattgtgtaatgtaaccgtaagcgaatccgactaagccgaaaaccgctgttattatccacattcccaaagttgagtagaactgcccatggaaatcctaaatcgaattatctcaataatgttaggtaattactgatttaattaaaatttgaatagaaaataccactactgaattttctaaataatcttccaaatgttccagcaatcccgctatcatcttgttggcatactattactatactatatattattaatattctactaccactaaactatatattatgttatgtagtagaagttaatgtatagtgtatgttgggaatgtgtagaaataaaagattatgatctcccgtagaaggcatttttaaattgataattcttaattacatcttctaaatttcttcttttataccttttcctcaaatttagatattcatctaccaacttcattacgccgtcatttatcacattattttccatctcatcatcattattaataatattttccatctcatcatcattattaacattattttccatctcatcactgctaagagtactattaacgctcgtaacaccattaacagtgttccgattgttgttaattaagtccattagtgagttaaaactttcattataactggttatatgttcatcaataagatttttcaagaatgctggcagaagtagcgacaattttcgtattcttacgtaatctttactaactacacttattaccatattttctgcattaatatatttcctcaaatcattgtcaacttttattttcctagtttttacatttgccaagtcctttaatatgtcatatacgttgactgaatcttctgaggtttgctccctaatggacatgacgtcctttaaaaataagaaagtagttatgatatagtttccagttttgacattttttagtaatacattaccccgtccgtttgggtaaaaacccattaattcattccttgcaaagttatttactaaatacgaactttttgggacggttgaatattgttgattatcagctccttgaattatagaaattttatttcgaagggacttaatcaatatgtacactgaatatcctctaaatgataattttgatagcaaagagtttgacatagtttcaaaaaactctctgcttttcgttaaccttgagttgatttgcatcagtttgaatgtgtcgacgttcattgcttttaacctattttctgaactatcaattaactctttcagtgcgaaataatctggaaacatcctctcatacttctctttacactcttttaaatagcttccaaattctccattatacgccacattactaattttaccagtatccgtggcgttgtgagtaacaacagggtgagtggtattatgagtattagaggtttcagttgctttatgagtaacaacagggcgagtggtattaggggtggtaagagatgaagaacggttgttagcattgttgaaatgtgaataattgaaatagatgggtgagataagtgatttaatggtatggaaaagagtgtgaaaatgaacggtaaatgttaccagatcagatccagcagttagtgtatataaaaactcatttgatggtgtaaatagtttccattcctgcatctccagtttatcaagaaatatataatgttttgctccttcgattttctcactacttaaaataatgtcgttaaaaggttcaaagctactcccatcagagttaacttcattttggggatttcctccaatatcttcaccggccagactattaagatagccgtaaaacagtcttgaaatcctttccatatcattaaaacagtatactacagttggatatagccccctttgcttaatatactcaaataatatgggtggtgaagggtcatgtaaaacattaaccaaagggtacaaatggaaatttttaataaatttggagaaatacttattctccctaacatttacaattagtttcaaaaggttgtaaagtcggtttttagaatctaagtaagccggagatcgtcgtagaatcctcaaatattgcctaaaaaacctacgcgctgagggaacaacggttactaattggttgtatgtcgtaattcctctagtttccaaggcttcaattattgaacgaatcactaattcatccagggatgggttcaaactagttaattttgtcttattattcttcttcttaaacatatcatacatttttttcggatcgaccacattctcaactccatcacctgtttgactagcaccaactgaattattagtatcaactgaatcatcagtgttagtattagtgttaacagggtcaataatagcattattggcgatattcttggtgctggtatcgaaaggattaagatgtccgtattttgttagtagattgaaggttggtacctttgataatgtgatgaccttagttggttttgatagagcgtttaaccagttagcaacgttatttacattatatatagagcttgataggccaataaatgtgcaatttggtcccagtcttaatattaaatcatcgtacaatgaacaatttactttagaatttttcatatcataatttacaccaaaattattaaatatcactaatttctcatcattcatctgaatttccgactttccccttggtttatctgtatgctccaataaattttcaccagtatttcgaagattgaaaaggtcgacgaattgttctacagttttgaaattagaatcaatgaattcatttgcgggaactaggaaatcgtcgtctaaatggatcctgagattcttatcggagaagatatttgtaaagggatccagattagtaaagtaagattctaaaaccttctttaaaatacttttaaaagaatttatacgacgtcctcttaccaaatcacagttcagagtcagagctttctttcgcaaatctatacctccaaaattagttaaacactcagacaatgccgaatagtctgaaagtgtaattgtgaagtttttatacaattttacagactcattgaaaattatgttaattccattgaaaatgcctgaatcattgttcaaatcgttggaaattacgttatgaacatttaccaaatcttcatgtgaatttgttacgtataataaacttgaaaatctcgactttcccttagaaattgaatcataaagcgaccttattatctcaattctcttttcaggggtagacaatagtccaataacattttctgaataagcgtatggtcttttatctacgtaatttgtggaatctggactacatttaaatttcggtagattatttctacttttaaactgatgtgtaaggggtaggtgtgatatctttccattcttactgtacaaaaatgagttacaataatttacaaacaaagatattataaatatcaagtttagaactcgtatttttgaaaaattggcgttataaaaaactaacattaatcttaaaacaaaacattttataaattttataaagggtgtagaatcatatattgcccaatttatgttggaatccactcccaactaatacttccagtactataattatacacaaataaattataaatgaatgaataattgctcgtaaaactttgttaaatattttgtaacaattattcttataaaattaaaattagaagctctaggaagcctacttagcttagtcggtagagcattcgcttagtaagcgaaaggtcgtcggttcgaatccggcagtaggctttttactttacttgagttaatactgtaaaagtttaattaatttacctattttaaacatttttataatttattccttaattatttatataattttgttttcctgattcctaccttgggttaggaacatgtgtaatggtaattcataattagttttgtacattatttttcaattcttttaactttgtttttcatttttcattttgtatcatagttattatttttttacccctttatttatttcaacgatttttcattttacaatttcacaatttaaacgttataatggcgaattttggtgaattaacacccctttacaaaagtttaagaaataaaatgagcaaacaaggaacttgatggatattttaaagaataatcagggcgttcagatcgaagagatttactcccttcactgtatatactaccctgttaagatacttaattatggaggtttacgttccgataggttcccagttgactgtatgtctgagtgtgcctatgcttctttgctcgagaaatcgaaattttcaaccaacattaagctgaatgagagctcaattaaaggctcggttcggtcagaactgctccggttctgcttcaaaatctcaccttttattacaactgagctttctaactcagtctactcacttgttgatgtgacttttccaaagcattatcctaacaagcccccgtttatagtcttgaaaatgaccatccctatgaataacgaattgaaaaaaagactaaaacttaagcttaccaaggaaattaacaggcttactgggcaacactgcctcttcgaaatcagcatttttttggcggattttatggccaaagttaactcagaccgtgaaattctattcgaagattccaccgccagagaatttacgcaagattacagaagcgtctcctccgattcttcgcattcttcaaactcctccaattcatacattaccaacactgttactaatatcagtaacacggttgacggtgctaacaaaactgaatatataaattcggagaggatattggaggaaagtgttgataatttagtgcaggttggagtgaataaacaacataaggagtttgagtttcctgtttggtcgatccagtcaatagttcaggcgccaatttggtacgaaaattttgaggaagaagacgagaattcgtcagatttacagctagaaaaggcgactaagactcccagtaaagttggtttcgctaagaaacagactcacaggcttgtgatctctgaagttacttctgagagtagcataaggagtaaggagtctgaggatcagaaaatacgctcagtgactaatattgagctgtattttacacttgagtccgaagttaatttaaagctgataaaaaagcttttactcgaatatactggagacacatatttcaggtttcagatggattttacatcagttgaaacagttaattccagtatttcctctagcctcctcagtgtaaagcacggtttagaccagaatttgtactatataaaggcgtttcatttaccctctttgtgcccctacactaacctatcgaaccttaatgtgagtaatttgctacacttatttagagtaaaacgaagaatcattttgaatgaaatgatttcgagggtctcacacctctcaaaactagaacacaacagcctctgtcgctactaccagtcctggctcgaaaagaaacctgacccaagcatcatcgaattcttaatccataacattgatacacttctaaaatatagatcattctcttctttatacaatagtaacactaataactcagttgaaagttctgttgtcactagtaaacagtttggtaacactagtgaccatagtagtaacactcaaggctctttagaaagccatactgacaacaccagtaactctgtggaaaatgcccagaatgagttgttgatattattgttgaagtatttcccagggcttggtgagcattatttgtacgagatcgtgactgaacgtaatttgtacgttcaggcacagaacatcaactgccacacattgaggcatgagattgaaaccaatagtttgtggaaagatgaaaagcttatttggcgttttatccgtcatttgttggatgttttggcatacttacatcagaataacgtataccaccagagcctctcactagataacatttacgtccacaacgacctttatgggactggaagaggtctgaaagtgtcggagtttggaataactggcctagcaaggaagttgttaaaacttgaaaacgagtgtgatcgcaagttttgtgactgcaaaaggtacaaaaaatctctaaaaactcagttatacctctcgcatccctcaaactacaacctcacacccaccacactatccaatatcacatcaaatttcacctccaatattcattccagactatattccatcgatttcgacaatcttaacattccaaatactgtaaataataatactggaaatgccgtaaataatagtattagtagtattaacagtgttgaaggtatcagtagtagtgtgaatttggagaactctgtacaattactgaataatcaattaaagggcggtttattgaataacggaatgatgggaatgagtagtgcgctggcgagcataaaatcaagcgagttggacgagttgcagtttgagcataattgggaccagatggcggctgttcaagaggacatgtttgctttagggttgataatcttcagcatgtggcatccgcctgtggaggagagtgcgctttatgaattactttgttatgtaattgggactcaaacatttcccgactactttctgcagacaactccgtcgatcatcatcaccactttgaagcgtctgttgactcgtgagaggaggccaacggcagtagaattgctcagagagacccttgtgccccctgtggttgacatttatatgtacaaacagtacctcaggaaactagaaaaccctcagtctgacgagtcacttgatgccctgaagttcctcatgcatagagactggaagtctgacgtctcaaagtataaacatgactccacacttgaaacaatgacacataactcttatgtcactgatacactcgaacggttcatgagatcaagaggagttatcatacgacctccactaccacttcaaatcaagacaccagataacgtatttttagctgaaacctccctattatacctttactattgttatttttatttattttacctgtaatttatattaaagtttgcataatatgtgtagaacgacttgttattggggattgatgaaagtaacaccgttttctcggttggaggaagtgttcggcagtctttgctaaggtcatttgagctgtatgcaggagatgatagtggaattggagtgaaacaattttcggttggagatgtttttgacgaggaaaagtgcattactgagtcggttttctcaattacaatgaagattgaaggtgactctggagttccgaagtctgccggtaaaaagtctctagactacaagaaccttgatgacaattgcattctgatgatttccactcaagttgatctcattttaatcgcaattcagtctgttttatcgcttaactttaacctcgatacttttttaaccattacctttcagccgttaatcatcgacttcttggggatagttttggaaaccaacacggaggtggccactgaaatattccttaaactgcagtcaacagatattaatgagtacacctttaacatattattgaaggagtattcgattaataaaagtggccagttaaagggactagtagacttactttcaggacgttttaacattattttggggcttaaaaaactacatttccatgttataaactctaaaatccccaagctctataaaagggattttattgctctttatcaacaattagcgcaactggatactgaatcttataataatgaaactaccgattttaatatcgaacccgttagtcatagcccagaaatgactagttacagacaagaaaccactattaatggagataataaagaatttgaaagtaataatgaggttcagggaataaatgagtatgagaaatattacaagagaatgttatatatgatagagttggcggtaatgttgaagaagttatcactcgattcatactgttgcatagagtgcgttttgggagtatattacactgaagtttgcgagtttaacactaatttcccctttttccacctattcgtggttgatgataggaagaacttggtgatgactggtggctgttatgggactactttatcctttttagagccatcaaacgtgcccaaagttgttcacttcgatttgcagtactttttggatgatttgataaggctttcagtgaatcatagcggaggcgttgaagggtttactgtcaagccaacagtttctgacactgttgacgtggtgataacgtgccagacttcaaaactcctcccggcagccgcatcaattgcaaataaactgattgacgcagggctttcgtgcgagtgcagagccgtcccactaatcctaaccagcgatttcaaccacaggctcagaactataaaaagtatcaaggcaagagttcacttgcagaagtcctcaaacccctcagaggaacaactggactcagtaaaaactagccaaacccaggttgaaaaggcgaaatcagcccagacaaactcagaaaatgatattcttgaggatgaagaagacaaaacccaccatggcattttgtaccatgtggaacccataaacgggtcgttcggccaggccagaaagatttataatgaagttgcactggtccattttataattggacaattaacttaatttctcatttctaatgtattttaattttatattcgctgttttcctgttagttatcgtaaaatgtgccgattcgttaaatttcttaaaaaccaataaattcgacaggagtaatttattttcaagtgattttaaaaattccagtactaaatctgataaatttgacttatcgcaaaaaaaattagctgaaaatagtatcttttcaaagtgtgttggaaggaaactaaaaagttttttcttccttctcaatggcagtcaaaacttaaagaattttaatggaagaagatggtttggattagattcttcgaagatttcggttgaaataaggccgggtgtcggagggaaagagtcgctcatatgggcctcagaactcgccaaggcatctttcccttccaatttacacagatatcctaactaaacaatacctatgcattcagtatagttgcagatatcatttttcatgaaccaataataaatgtgttagacttataaaaagtactgtttaaagaaggattgtgatgttgatgagcagaaggtattattctactccattatatgtaaatgatttagcttggaaccaccattgttctaaatattaccggagaagatcgtaattttagcccgaagtatttttttaatattgattacatagttataatatagtatataatcgtatcctaatgtgtattatagtactgagggattggaggatagattccttagagaaggaggtgtacatcaagttaaaagagttccaatgactgaaaaatctgtaatctcttagttatattagtcaccgtgaacatagcttacaactttatcttttaactactgttattttattaattatatatactatattatagtaaattgttaatgtgatataatagggtagaatgcactcatcaacggcaacagtggcagtattgccaagtgagatggctaagggaaggggtacaaataactttgaggacgttttagaagcggttgagataaacccctctgacattgagtggaagacgtgccgagcaagtggcccaggaggtcaaaacgtcaacaaagtactaattttacttgatttttccgtttaggttgaaactgcagtttcattatatcataaaccaactggaattaaagttgaatgtagtgaagagaggtacttcatttcctgttatttatttatttacgatagttttgcaggtatttaagtgtagttttagatcagattataatgtataatagtatattgaaaaatgatatagatcacaaggaaagaataaggaattggctttgaagaagctaagagaagaaattgcaaggattagaattgaggaaatgttctcagaggcaagagtacgaagaaaatctcaagtacattttatacagaattattccactttacacatttataaactaatcataccgagttatacaatttcccttaacgagttaacacttttgtatatggttatcagtatagaataagagaatacttgtttgaatagattgagagccctaagagatcggataggactagaacttactactacaatacgaaccaaatcatagaccaccgctgtggctgcaagttcagccttgactacttcaccaaatgtagactggatgatatcatttgttctcatgtttaacaccataatcccgattccaatttcttacacattttcacaatatagttattctaatcttatacaatcgacaatttttacattatatttattttaattttatattaactaattaaattggatgactattttttaattatatattaaaatttaaatttacatactagtttgtaccatagaatgattttaaaagtgttagaacagaataaaaactaatgtcaacttctcaaggtgaagaagtttataaaaatgaagaggaagtccaatttgatgatttggaggaattatcgcaagcttctaaaaattctctaatagttcacaacatgactgtggtggctgacacaggagtgaatttggacctgagcgaatctttaaacaagttcgggaactctgtatacgaccctgccgagtttaactgtataaggcttgatgttagggtccggaagtctttggactccactctcagacttgccttttcagaggaatttgagtcagtttcagacattaaagtcgttgaggccaccaaggtcactaggattccattcataatgaacacttttcatccctattctgattgtccaacacatcaaacaacctggaataatggtaagattccatcactcccagtgatttcatctattctctcactaggccttagtcaattatctaattatactatatatagttaaggcgtgtataatgagtagaatatacatcggtaaagatatcggtattttctaacgggaagatggcattgactggtgctagaagtttgttgtcggctgctgtggctttggagaaggtttgcagagctcttaggagaaggattaacgggaaagctagagtccgtaatattgtctgttcaaatattcttgctgtttacacttaccctcacaagataattttacccttgttccacaaggcatgcaaggactccatttatgacccgcacaggttctcaggtgttagagttagagttcaaattaagtctcctcagactttcttctcactcattagcatactcaacaggttcaacttcagttctaagtatactgaaccaactcaggatactgagacaaaacctgagccagacgagtttgacgatgcggaagaggaggtagaggaaattgttgagaattttgtagttcctaacgtcacttccagacccaaaacccataaatataaagcgagtaaaatcggtattcatagatttgttgattcaactatcaaggataataggaaggtacgtaagggtttctaacttcctctattgtttccgagggacttatttttacaaaatttacctatttaagcttaaaattttcattttaaatactattatcagctaaatgcccctatcaactgtaaaacaccttataggtccacaatttggttccgaaattggttaaaaagaaaagaaaaatgttgaaaggtgaaactatctggactaaagttgaccagacagcaaaaaagttagaaacaacagaagatgaagtaaaaaagccagaatctcaatcaaaaccgtcaaaggaagagttcgtcactgtcacagtctactcctcaggaaacataaccttcaccggagccagatcaatcccaagcttacagcaagcgctttcttatatttacccattcctacaaaataatcaacgaaagtatacacaccagcactaaaaccataatgtactcattattttaaattcatttatttataatttaagatttattaaattatataatttagttctagtcaactttatagcttggtgaataattaagagcaaattagttgtgttaataattttatggaaaagaagggggaaaggaatttagtgaaaattaataaacaatacccataataaaccagtaaaataaatttaaaatagttataaattttgaaaaaattaaattaacaagggaagataggaaaataatgtcaagtggtttgagccacttgtcagtggaaggaatccccctatgtaagactaatacaggcccatttgataatcctgaggactgggaaacgcggttaaatgaggagtttgcagctttaattcagtatgttgaggaaaataaacaaaacaacactgaatggttcacactcgactgtaacgacaacgggacttggtaatttttgctatttttctcatatttttagctggtttggagaatgttggtatgttcacaacatgaaaacgtataaattccaactagaacttgaggtttctgacttcctattcatatttcttcgcctaactatgttattcctatagtactatatgcagctgtatataataatatagtaataatagttgacattatagtaatagttactgtgtttattggtttaaagtgtgattagataccggcaggatatccgaatgctccatttgatataataataagatcactggagggtaaaactgcgaagatgtatagaggtggtcggatctgtttggatgctcatttccttcctctttggcagaaaaatgcccctaaatatggtatcgcacatggcctcgctttaggcgtaagtttcaaacatttctcatctgttcagctcgctccctggctagcctgtgaaatccctcatcttgtcaatatcggtgttctagataactaatctactattttcaatattattctttagagttgatttagaattcccatttaattattattttagtatcatacatggttaatatagtattaaaatatattaatctgtttaaaaattatagatttatttgtttgaatttattcttggttagagtttcgagtgttaggctgttacccaaagttccgacagtaccgacattaaaatactggtccaaatcctgcattagtttcacgtaggaattcaaaagagattccacactctcctcaaggccgtacatcctgttcaatatctcggaaactccaacttccctgtccttactctcactttccaaatcagtgatgtggacaaatttaaggtcattaacacggttaacggtgtcagcgttaaagtgagtgttctgacttttgagtgaggaataaaaatcagctagcatgtttaggtccctaatttgacccaatttcttcacatgaatgcctctggccattagaagccagagcggccaatggaaaaagttgagcttggtgagctggttcataagttttattaaatcatttattggagcgttcttaagaccgtttactacataggggacaaataaagtcaggagactctcgttcacatggcctgttttctccaaactttccaaacacaatgatatatcgctcaagcttaaattatccaaaacttcagtaaacaaattttgtaatactgagtaatccgcaactaattcgtctgattgtttctcaggtgcatcagttggttctgttgagacgtataaatgtactgttaatgaatgtaatgaaattgccagtttattgaccagtttactgtcacacagtcctgaggtactcaaaagcctaatcaggaatgttattgtggtcagttttaagtgattttgatcaaccaatttgggaagcgattttaccaactcattgaaataattagtaatctcgcccaatctaccatttacactgcgttggtgttgcagatgcgagtgtatgagctgttgcaagtggaaagaagatttggtgaggtactccgtataagttctaatgcggtctaggctggtgtaaatcatcttaaagtagggaaagtaacagttgtagactgtctggagcgttgtgttgaaggatcgcatttctgctgagaagcggttcttctcaaggctcatgaacttgccgtcagagcccttggattcagtggtttttggaacgttctctgcaaagaatataagctttgaaataaggcatgaaagaagtgaaaaatctgtcaaggcatactgctcgtatctcctacttagcttagtaaacagcactatcatgaagtaaacctgctcaattgacatgtcagaaactgtggacaggagatgacggttataaacccccaaggctgcattaaactcagactgcctaaccctgaaccaacgactgtaagaatcagcgtatattgcatatggacacaataatagtaataattcatcaatcttaaagttaccagcagcctacacattttctatttaccactaatcagttaaatatatatagaattgtgttaaatattaataactgctcatataactaaacatactattagtataaaatgggattagtagttaagtgggtaaaatagtgttatttatgggttacctgaagaagagaattggtttgtgactgtaaaacattaaaactagttttattgtacatgacatcaagtgatgtgttgcagagatactgtactccgagcttaggcttattcgtatccttgaggtgtgcaggttttctgtccctaaatggatttttctgatgaaattcaggtccctcaggacgttccctatggttacagatggatagagttagggttttggttttgtcgtggatcttggagagtgtgtcaacctcacccacgagttttaggttccgggccaatttcggtgcgatagtcgaccgtatcatcgtttaaatattatacaaaatttttattaatattttacaaaaagctacttgaatttttgtgtgggcgaaattctgtctgtatcaaatgtgtaggcatacttgccccttgggtaaggcaccaatcgcttgagagagacgtactcgatgcccttgtacttttgcacaaacttaaagtgccctaacttggtcgggtcatttccacttcctgaaacgtttttcggaaatggagcaagtgtcggattaacgtttggcgggtaaggctgaacgagtgcaaatttgccagaggaagtagcacaaagacgaaattctcttggtcgagtcttcctgttcggaagtcttctaccgttggccaaaatactcccgggcgcaactggtctataaagtgaagaatctccgtcaccaatcaagtagtgagtacttttaatactcttcttcttcgcccagtgcctaatccacctaactccaccaatattagctccaaacacattaaatctaggtaaaaattccatctaacctatgaaacattctgattaactctttattttcagtggccattacactataaaatgtgtaaatagggtacttaaataccaaactacagctaaataaagattaaataaactgtaaatatagtttaaattaacattagattaacacttattaaatgataaaataactgttaaataaataatgtgaagagtggtgagtaaaaaaattaatgctaaatttctaggtcctcgtcccacttgattgatgagatgtaggcccttctcttgggtctgtcgttgaacttgcagaagtcgtgagggtcatcaatgtactcggcctccttttctggctgtttaggcttcctggtggctaaatcctgctgcttgacctggagccctacctgcaaattcattcctcctttctgatacttaattccaaccttaccagagtcactaactctgcggcccatattatcactatctctcttaatttcactatctttcttattcatttcgctaaatctgcgggttatatcactgaacctcttccccaaatcactgtcctttctagttacatcaacttcccttttgcgcttatacatgtttgataaatcagtcagtatcggattatttgccaacaattgtgtataattacttgttaaatctattggacaccttcttatcggacatcctgccttcatattaacattatttgccaaattagtgttaaaattgatattaaccaagttagcattaaatgtactgctgttaatgttgtttccagaaatattgttagtgttaatggcaatttggttaatagtgttggaattggggattttactgggacatgtgagagaagaaaggttaagcttcttaggcgagttaatttgaatacaaggggaattcaatgatatacagggtgagttgatcgagattgatggcgaattgagagatatagagggggagttattggatttaatcgcgttaagaggacaaactccaggactactaattgagctaatggcacccaaagtctgtaataaatccttaggcttagtttgagttctcgagtgagtgttctgagtattaatgtcatctttagggtctcccaggatgcaagttgaccagcctgtaaggagggcactttctgttggtgaggtgcattcctctgccaattggcaaagcttgaaaaccatggttggatcaacctgtacgtccttccctttcttcacattactcatcaggccagccagctgtaagatgaactctgagttggtgcgtgcagtacttggcggggatgtggtcagcattgaaatctcgtcatccaaactgtaagacgctgtgaactcacgggtcatcctccaacgagaattcgccaaagactcaaaccgtttcaccatctcctccactctttccaaatcggtcaatactggaatcgtctcaatacctgaattattcatatccttaaaatcaccattaacatcatttgattggttatcactgcctgtattattagttgcattatgatttctgttgtttgtgttatcttttgtattattggtgtcgatggtatttttggcattaccagtgttggtggtattagaattattttcccaattaccttcaaaactcttaactgttacagaactatccgcactttcaacattattaccactgcttgtagttattgatttcaacaggttgttatacttgttttgaacaatctttgtgattccagttttcttaaaattagtgccaccacacttttcgcagcgtgtgagtggaataggtgtgatatcggttggaatagtgggatcagggtcgttttccgggtcgtagaggtcgagtgcgatccagagactgaagactgggaagcatgcgtagagtctgcggatgagtgagaatggacagcgaagtacgtcagcgcagacttcgttgactacatcgtttgacgtgaggtctcggatcgcggccttttggcttcgggtgtaagagacagactcacgttctctgagctctgggttattccgaagtgaccaaagcccggcgcaaagcgccaagtagttaagttctgggtgcagaaatggaatgagtctgcagaggtcctgtaacacgtcgactgtgcggctgaaggggaaaatcatcaaacacagctcgggtctgaaaagccatgcaaacccaggccgtgctgaatccttagtcagcattgcgttgcccaagaaagatatgttcctcgggactacccaaactccgtttgggaactgaccgttgaggcttgaaccatcaaaatgggactgtaggtcgtagtttagtttaaatcctcttaactcactcacttttacttcatgttccttcttgtcgtgtaaactgtgtaccaaaatacgttctggcactcccacatatttgccttcaaatattctcagactaaatccatcacaacggcaggttccaactgaactctttaaattatctgcatttccactttccacagagttactggtaacatcaccattattttcttctttcttttccaaattattattacgatcaccagtattaccattgttatcggaggtggcgtagaagttggtttcatctgagggaggtttaatcggtgcgataggtgagttttcagtggagaaaaagaggttaacaaccacgacgtctattgactcatcgttttccgccaaattaagtagtgataaacatgagcctacgtagaggtcggtgttgacgtcaagttctctgggcaggaggcgccagtagcccttctcgagcttaacaacaggtacatttggcgggataaaattcctcaacaggtacatccgttccttcagctcgttaggtactcgtatcatcagttgccctgatgagatagaagccactgtgcctgccttccaacccatcaaacttccgtacttcaacggagccacttgtacaaaagtctctaaaatcatttttaactaatatatacgaaatttttaactactaaatacacccaataaacactaataatgtaacttaatagtataacataactaaattaataatatagaggtcttaaaaaatacgttctgtgatggtttgtggtaaggtgttgagtttgggccacatgtttgagtcggtggaattgaacttttcaaattgtacgtgtatgttatgacgttcagatttatcaaaagggatgcttatagtctctgattgaactactttagagcggtcaactgacccgcagacaaatcgtgggaagtgaggctctccgcccgtcttgtacattgacgagagcgtgtcgacaatcgtcagacgctgtttattgtatttaattccagatgaagtcgtcttcgacttcgtacttgtagtcactgactgaccactcgatgagatctccttaccagtcttgttcagcaactgggtaaatgcattcaatgcttcttcattactcactttcatttccgataatcctattccaaacattaatgataaaaaatatactagttactaatcatttttatgtaaatggacaaattgtgtaaagataagtcccgctgggggataaccggaataccagctgtgactaacctgcagaagtgtttaaggttttagaaatttggccttgagtattattactagtgttattaagtgccttccttaatattgacatttcttggtgattatagagcgattccagcattttaatgtgtttgttaaggtagcttaggttgatgaaggcgagaagtttcccaaaaggagtgagatttccatactgattggtattctgtagaaggttaattaaaaacttttctaaggttctcagggttgccacatctgatgaggtatagagactttcatgaacactagagaggtttctcagcctcgtgtctaaatcactctggccgtagttgtaataactcgataaaaggtatccatcgcattcatcctcaaaattgtcctcaaaaagtcccaaaatatcacttggaggtaaagtagaaccacagtcagaggttcccaggctgacagcccctgactcggcatatgacgtgggctcgtcagcgtcgctcggaatccattcaaacttcccgccatcatccaaaacagctccactctcacgagtcggagtcatattactcgaaaacattttcttcaaaatatttattgattcatctgatgaatcaaagaacgtcgaatatgggaccttatccgtacttttatccatggaaccctcactactgaatgaattgctgccgactgaactattactaactgagttattactgagtgaattaattctactaagtgtattgactgtgttgtctgggttatggtgacttcttggagactggcctgagtatgggtttcctgagaaacttctgttaaagactgatgaaaagggatttggcttacataccacaggacaaggtcctaaaccagacaaactattcaatagcgaattattcattctaattccatctcttacactatttttaaccctgttgggacttggttcagtgtgggctgtatcacttttcgaattcgtatccaataccacattctgtgaactattacccgtattaggcatattattatcactattcacattatttataccattatttgaaccactagtattattagcgttcgtgatattatttgtagttgtgttagcattactgagagtattcgtagcattcatgtcatgtgtattgaataaagtttgtgatccgatttgtgtagctttgttaattcccaatcttataaagctggagttaccgtcgaaggttttcatcataatgggattgcaaaccaaatttttcccgacatcaaccttagtatttatcacctcattatcgatttgttcaatcatgctctttttcatgttttaccagctattctacatcaactagtgctgctcatataataagagtgtgttttttaaaattggcgaataaagttaatgtgtaatagcaattgtagcatgagagggttagtgaggacaaggcatcttatttcaatttaagtcaatgtagaaacagtcgaatctaaacagatttataccttacacttgaacaaatctatcaagtggtgatatatgattgtgacaaattaatgtgtaaattgaatttttaagcttgtgtcttatggtgctattttgtggggtaactttctgaaaatgaattgagaaagtacctgcgcggttggtaataaaattatcagaaccgcctgattaagtgtggaatgaatggataatagtgggtaataaaagaaacaaagttaaaatggggcaattgttcaaaaatgcataatttaagtctttaaaataaagtgaaattatgggattaaaataacttataaaattatccaaattcaagcaattcaattgataacaaaacttcgatggtataaagttcttggatcaatcgtgttgggattgtttgaaaaaaaatcaaaaaatttcttaatgtacaaaaaatataatttgaatgaacgtgatatgggtttatgatgaaaaatcgtgtgtgaatacataaagatatgttacagagataaaaaaggtcgtctgtttccttaaaatgaaaggactgaaagggtcccaatattaaaaggactgaaataacgagtcagttcccaatgtgaatgaaaagaaattttatcaaaacgacagattccaattttgttgcgtctttaatctgtgatgaaacaaaggttgttaaaatattctcaaattaaactacttgaagaacgaaataataaaataacaaaaaacttagaaaatccgggcaaaaagggccatcggaacatttatcactctaaaggcaaaaatactcatgttaataacgtgtaatttgtcagaaaattaagcaaaagatcaacttttcaattatattctatcattgcttcctggtgacactacaattaatcaggttcttttcaaaaagcttattcctaaattttcacactcttccttctcaaatgttagatttttgattttatttagtagatttctcagttttaggtccttaatactcaaatgtgtcgtctccctatcaatccacataacaacccgttactcttaatttattcctctaaaaatattcttctttccaccattgacacattcgtttcagggttttttatttttagcattttttattgttatttcggcgttttttatcctctacagttcgtatattttgactcttgaacacaattatcctttcaatttttaaactagttctgttttatttaaacttatattattgccttatttattacattaaatgagatataatagttatccgatattaaagttttaaaaatgtagagattctaaataaattgcgtaatcctttaaccggaattaggtatatttcttggttgtgttaacattatcttaggcatggattattctttagtatatacttaatacgtaatgttaaatacaatgtacttaattaatgctattatatatgtgtgttgtatacagtaatatactatataaaatattcatatccgggtatatgtgtattgttgagattgatatggaaaattgtaaagaaaaggaataaaaattaaaggtgttggaaaacctaagaagtattatctaattccaacaatttatcacttaatgtttaaatatgtaaatttttataacagttcgtttttcaagtttacccatggggtgttgtttagtaataatataaaaaagggaccatagccatgtcaaataacatctatcaattttattaatttattttttacagtaatatcagattcaatcacagtatttttatcttacccgtgatttcgtatttgtaattttgtggaatcacaaaacattttaaaagtcttacgatggagtcttttgagcatataatcttgtagcatacatttgattgatttttgtattttaaaaaatggatactttggaggtcgatatcgacgaaaacgtagatgacttaggctataacgaagagtatgaccctgaggaacaccaaaataacagaaaatctaacaaggaaattgattaccaggagttagaagaggattttaatagaagatcgttcgattatgggccttcgcgatcaaaaaggagaaactttagaacacaaaggccttgccaaaggcatagagaaaactttaggtatcaaaaccatagagaatccagaggttacggaccttactctaagcaaaatagccttccaaatcgcactaatctaccgccaaaggctgacgaagatgagctgaagcaaattgatgcaaaactagttaccctgctcgactcattttcaactgccaaagaggatattctctcggttttagaagatcttaaattagtaacggataaacataataaagttattgccgcaactctggttaaatgtgttgagtcatttccagtcaagacaggtaccaaatgttcactcgtgtatagttattccataacctattaattatatacataaaatattaatgaatgtataggagcatatgcaagtttggttggacttttgaaagtgagcggaaagactgatctggtggacttaataaaccagcaggttttgtataatctgggattaaagttgtcgaatggagaccgaacagcctgtgtgttgctgctgcggtttcttatcggactacactgctcgaatgtgacttcaaactcagtatttgaaattttgactcttcttctaaagctcgcgaatgaggttgaaaacttcccctacgataccagtgtggactacgtaaagtctgtagtaatcctggataatctaaactacatggtgctggcgagtattccctggttcagcagggaagcattcatgacaaacgtcgagactataacttctatgtgcgagaagctttttgagtactctgagagaagaatgaggttaatggagtccctgccctcagatctagaatttaaccctaaccttgacttgtcagacttttacgccaagagtggaaatacgaaaaagtttaacccttacgtgttcaagttttattataaggatactgttaacttgaatttggatgacagattcacctcaggagttcacgctctaaaatcactcctcaaggtactttttacttaaacttgttaattagttgcatattcacgtggcaattagttaaataaatttaactcactaatgttaattgttgatgattagaatgattggacgagttcaacaacgtatcgtttttaccagagcaaggggattgtggagaagcttaaggactcatcggactatacagagaacaaagtcacgtcagataatttaaactcagttttacacttggatcttaagaacttcaataacttcaaaccccttttaccgaaaacattcaatttcaattatgtactcgataagtcacaactaactacaacacacgacaaatggtattaattatctataatattagtgtattagtcgtattattgactgtagtgtcaaatttattaaaatttattgatagttaaattattggataatagagtttatgaatgtgttttaggttatttgaagagcatgtatattatgtatttgagctattttcggacgattcactcagatgtgcacagcagttgttagcaataccattgaatgaggagtttaaggagtacgggatagttgatgtgctgcttaacctgtctctttccaagttttatgacaattactactcaatcttcggcactctggtgatgcataacctgtgtaccctggaggagaagacggaggatatcttctactcgtacgtttctcagctgttggcagagacggataagctggattcgtgggtgctgaacacgatggtgaatatctgtagcttctggttcaacatggagttttgcaagatcaggacgtcgtcagacgatattaacgttgagggagagaacagtgatgagattaggaaggacctgatcaggcagaagaatagcagacttttcaagacactctttaagccgagtaactgcgctaacaactataacttgaggctaattgagaagatttcaaggctggtttacatggatagactcttaacgtattctccaactgacctagaatctgagatcagagcacttggagtgtccaaggatttcaagaataaaccctacgaacacttactcttcttgaacatgttacactttaataagctcgcagatgaggaaaacgagttgaggaatagaagaattgtgtcatttattaacaactatacaaataagccgtatctcaaagaacagccaaaacacctgttctcagaaaccaaggaaaccaaagattatgatgaggttatacatacagatgaggatttaatacttaatacacaagcaacaaatactaatttgaccaattcacagctagatttgaatactaacttaacgagtatacaagtcgatttgaattctaatttaacaaatacacaaacagcaaatttggtgagtgccggcaatgtggaggtttggaaacgagatgatttgatactgttgttttgggatacgttgttgatatttggaagtaagtcaatgacacacctgtacaggttattggagttccattcggatgttttgaagatgtttgaaacaccagaatcgccatttgaggaaagtttgccctataaagttatgtggcagacagtagtgacatttgaaagggatcataagagactggagctatcatttgactttttcataagaaacaatgtgttcacatgtccaatgattttaaagtttctgttcacgctaccagctaacgtactgatgtccaactttttcttttacgcagttaactccgtgttctcagaagtgcattcaagactggtaaactttagagaaagctataaagtggccttgagagaattagcaggcactgttgcaatggaggcaaagaagcaggaactggataccgtggagctagactactttaattttttcgaacaattcgtacgtttggttagtgacaggctttcaacatcagacgccaacatcagaaaagtactggaagaacttttagttaggaaacttgtaaagtattctttacaggaaaaggtgaacatcaaactatacaattctgtaacaaatgttcatgaaactgtcaaagttacactatacatattggcaatgccatcatacctattaccataatatattattacatacctatataaatattatatacaatatattgattattatatacaatatattaactattgtatacgtgtattatctaaaagatttagggtttaatattatatattcctctttcttgggtctagcctggataattttcattagttggaatttatacatgagtgagagggcgtggaaaacagggtcaatgttggccatgtctttccgagtcatgtttctagtgttggcgaaaaggtccaagaagtccaaatcggtctggaaaactgagtcgaaggagtctatttgtctaagcgatgagaggttcatgaagttgcctaggtgaatgaaatcgtctgaaacggacaaatgattacattttctgaaagtgggtagaccaaacttaacgtgttgagatatttcaaaggggttcctcttgtaaaaggttaagttcttgttaaatggaagagcctggttagtcttggatccgtaaacgaaagggagtgaacttgaaggctcagcacacttgaaaagctgcaccacaggcatattctcgtagtaaacctcctgctctatcagaagacggagcataatctcgttgtacctaaactccttctcgtggcattggataaaccgcttatgacgctttaaaccctttttcgaattcgataacatcatggagttggcaagcctaacgaagacgaagttcacattcacaggcctgttgtggtcccttttgtcgatttggataatcctcttctggtccatgagtttatacttttttcgttcctcagccgatttaacgtccttgtaactggtgttgtaaagctcattaaaggccttgtcaacgagcttgttgtacttgatgtggccaaacatgggcatccaccagttgaaatcgtatttctccttagaaaactccaagattttaagagtttcatccaagtctgaaactgttaaggtgaattttactggctgaatattgtcgtagtcaggctcaggagggattggcaagttgttccttttggccttttgaacctccaattcgtacttctcctttagattttgacgccgttctaactcctcaatgaggtcattaagtgtttcacgtttctttttgtgagttatgggaggatgcctggtgaagtaatagttacccagaagctgatctacagccctaacgagtgcgatagattcagattgccaggcgcaatagaaaacgagagcatagtatgtgttaggtttgagtgggttgtaaatctcgagattagcgaaatcatctggttcaggatcataagcctgagaccactctctgtaattcgataaaaaagagatcaatttattgacgtaaaatgaaagaatctcccttccgtccctgaaaagaacaagcttgttcttatcctgatgctcaatttggacaatgggcaaggaagttatgtttaaaggtgttgtaattctagaacttccgaaatttttaatcctgaaatcagacaaagggtcgtcaaggatgtagataggaggaggtttaggcttcggggaaggaatcctgggatttacagcttctatttcagccggttcaaataaatttactgaaaaatcagtatgtgagctggaatttggatattttacagaaaaattagggtaatgtgtataaaagtgttcgacattattaaagtagcgaaaacaacagcaaaaagaaaccgagtttaataaaattttaaaaaacattataaattaaaatattaccatgtatacaaataagatgaatcatctttaaaagatttaatctaaacaatttacaatctggcaattttccaagcgtgatagtataaaagaataaatttacaaaactaaattattcatcttcattattgttattttctagtgtgtatcctgaatttcaatgaatagtaaagaacaaacccatttcagccaacagtttgtctctcttgtcagaattaaagagagtgttggattcctcccgttccttctgattaatcctagtaaaatttaaatattttagtgaaggaatcttgtgaattaggtactctctgaagtgaggaacactaaaataatataacacattggtaaaaacatacgcaacgacgtggttgtcgagtacggctagcctttctaattttttacctaaaatatattagaaaatgtgtggaatacagttgaagagtggctcaagttgtgaaacgcttgtaatctgaagattccatgttgaaacattaaaacgtacggaattattggttaaaaccaaagaagttaagtttggaagggattctgaaatatcattagcgattttggaaatgcgatttccggcaacaatctaaaatttaatgatgaagtgaggaaaattaccaaagttttaagcctagttagtagcgggaaattttctaactttattatatcattgtttgaaagatctatagaatcataatcgtcatttgtggttccgaggttagcaattacggagattcttaaacctaaacatcaattaaacacctaaactaacccctcaaagataaagtgcgatctcctgtgggacataaaagatggtacccccttgaaattatatcagggctcaatttcattataaatatacactaaaatacaaataaaatcaaaattgtgggtttgtgattctacgttcacgatataaaaataaattttaaacccaaattgagggcttgtggcgcaacggtagcgcgtccgactccagatcggaaggttgggggttcaaatcccttcgggctcactttattaatataaaattaaatacgttacaattcttactataaaaattacatttactttttgttagttaaatttttattatgttcctcaattctccttagaatctcttcattcgtgaggtttgtatctaatattttcttaactcccctttgaatcttcctaacatattccacaaccttttcaccttgttccgcatttttctttagtttttcaagctttaagtttaacttttccagtctttcctctagaatccgcttagtgtgtatcatttcaaccatcttgtcaaatttcgtttccttaacctctccgcatgatttaagcctgccgaaaacaaaagacttcgcctgattgtacttatgaatgacctcttttaaaaggttaggcctctcaggatcatattcctctatgcagtctatcaaatcctcctggaacggttctagagtgaatttgcttatcagccatggagttattacaatatcctcaattcttgtgtaatcagcaacaccccttttgtacgaatcatatctcaacatggtatagtttactacaaactctagccaccagcttggaacaaacgtcctccttttctccaagattagcctgtttagtgactccctaattgataaagatacagcattcctgctactaatactcaaactggcattaacacttctatatttcacaaacctgcccttcaaaagctcaaaaggcggttcaactgttatacattttttcttaagatttagagttatttcagcatttgtgtgccatagtgtaaaaaactcaacaattctcctaaagaatctcccgaaacttccgcctccgtaatcttctggatcacctctgattgcagttgatttcgatatctcaacaataatgtaccaaagaatgattagacaatatccaccaaatagaaaaatcggagccagactaccaaagttaaagtcataactgaaactcccctaatcaaaattaactcataaactaatacctgaataatacaagctgttaaaatgttaacacaaatccccaacatttgcattttattaaacagattatcgctcctcaagttaaacggataaagggtgaaattaagcacagcaaatagacaggataacatcatactcgatactatccttaaacgccccgactcagcaggtgaaataatcccaatctgaattgtacaaataatagatattataaatctccttaacagaacaactgaatcccattccttaaatcctcttcgataaccaaaaccaaacatctctccaattctgtcaaatttgtgaattgaaatgtaacaacaaaaacaacaaaaagataaaactacaatagaaatcgcggctgtgataaacactacaaacctgaaatttttcatagcacatagttcaacaggcatgtgtaataaaactgaaacacaaggttgcctcttgtatctcacttttacacaccaaaccatctgcaacaactcaatccaaataaagtgcatctgaataaagtaacaaattgccaagattcgaaaaaataacactttataattatccctaatgatataatcccttccaaaagcatctatatcactggcatttgaactgtttttaaaaattattccaaccaactttaaaaaaattagacaaattggaaacagaataatggaatcaatagccggtattaaaattgaagttatcctctgaacgtaccataaaataatataatctgtattcttaaatatgcatccgattctcaaataagcaaaggaccttagaggataggcaaatacactgttgagtacgggaacaaacctcttaatgctcgagtttgtaaatacactaattatcccatagggaagcattgtaaagtaaaattctataaatattttaatgagaacaaagcatacaacttggttgtagaataaaaaaatcgccaagatcaacaccattgaataaatcaatgcttttagtgataaatacaaccaaatttcattcagaatagagttacattcagtgcagtctgttctgaagtgggaattgtcgtaatttcttatacatctgccacaaaggtatccatcagaaccacgggaacagtaaccggggaattgagagccacatctgaactctaaattacaggggtggaactctacaaattcagtgtatactctctctactatagatacgttctgtttactcgggtcccaaattttgctactattttcaatattattgtaagcaggataagctgggtaataaccctgcttcggcttaggcataacatgatcactcagcttaattgaatcaaatttatagtccttctttaataacttaacaatctcaatgtctaaccctcccggacattttgcaccttccatacattttgagcactttagatttttatacccatcaacctcattttctgaattattagatatatgatactcatctcctgtattcttaggttttttcaccctcatgtatctaccatactgacaaaaacattgactttttgaaactgagccaccatatgttgtggcatactccatacatcttccactacaaggtgagttctcctgaccctccttgaacatcccaggctcacatggaatacatctatttgaatatgttctcttaacaacatcagccaacactgaagtaaagtactggtccaaccctttaaaatttatcttttgttcttggaaatcttttccctctggcatataaccgggtagacataaacactgtgacaatgaagatggattggtggattgaggaggtataccagaaccaaaagggcacttgtaggaaatattatgaattttatactttaattcacttattttagactcactattggcatcagaatctacgtctccaaaccatccgccaggacaataatggtcagttaaacacttctcacactttattttacgagaattgttattttcagagccatttatttcagacggaactaagaataaagaatcggttaacgataatttataggcagaatcactcacaaaatttatcctattgtaatcatcaattttcaaatctagctcaatcataacctccttatcacttttataaattgactttccagttacaatgtatttagttgcaatcggcatattttcagagttttctaccacagcatagtagccctgagtgcaagcacagtcagaagcatgttttgaacccattttataagttttaaacttatctggacacctcaagcaagaaaaattgccaatttcttccttataccacccaatgctacaaggaatacactggttcttgactagtttcgatggctcataccctgccttacaaagacatgactcaacggtgttagaacctatttcaagcgttactgaattttcgtggcacggggttggaattctagtaccagtacaaaaactgtttagtggacataaaacagccttaaacggaaaattataaacaacttcacaaagtttgatagtttcagattcctcataattatctttaatttgaaggtcgaaaaaatataatttacaccttttaaattctacattaatgaatctggttccatcatacaatctaacttgattggttgtataaggtgttgattttttattaaggtaataaccatcctccccaaaagagtaacctgtacaatatatattccgcaaacattccttagaacaggccgtttcagtctcccttaaaacagtagtgctatgccttgaactgatgctgttctttttggccattacacattttacctttagttcattagaatcagtcctttctttgatatatttgctttcaaaagattcagactcagtatggttgtcatcttccaccaataaagaatgctcaactgtgagcaaaactttaataaaataacctttttctgggatacatgataaaatgcttttggatccaactgacagagttgttgtgttatccggacagggtaggcatgatatatcacttgattctaagtgctggaagaacccaactttacactggtgacaatcaaccgataggttgatgggattacgatacatataaatatttccgtatctcattggacaagtacaatcaattgcagaaagagctttatcttggtttaaaatactgttcaacccacacctcctaggttgattgtcaaatccaggacagtatgaattgtatggacacttgtaacaatctttagcgttgatgttaaaataataacctgaaatacaaaatctgcaatcctttacagacgttgaacccagttcatttgtaactaaaacagtatttgaagtttcattttgaaatttctccaagtggtttgagaataattgataaattcctaaatcatcctcgttggatacggcgcattctaaattaaatctaaaaagatccgagttctgatttagaggcctagcttcatttttgtttgaatgtgcgtggcaatatgtgcatggaatattacccacagtatccttgtacccgaattgagaacaaggctcacaaccagaaaaggtgtatccgtatcctttgtcacactcacagtcagcttcactagagctaaatcgatcgattgtgcttttccctaatccacataagttaggaggggaatctcccccgagacagaaatatccaatatcacaaggtgcacaaattggacttgcaacttcaatttcttcgtacttcattccaaattttgagcccattcctactgaatttagcaaatccaaaggaattgtttcctcaggtgagcctacattctttatattgtaaaatttcggttcacagtagcagtgtaattcttcgagtgattttgctccaaccacttctgatgttacgttatttccacaagtacctgggcaaggagtatcaccaatatcatctttaaatgttccgggctcacataacacacaatttccacctttaaaataatatcctggtctacacaaacattcccaaaagtgccttgaacccaattgtttagtggtagaatttggtttttttaaggagcaaggaatacaaaagtcctcattttcatcatttctatatgttccaacagggcattgttcgcattttctcagtgctttattaaattgatgtccaggggcacatgatgcaaatattgtgaaagttgttgagacatgtttgagtaagtttcctccatatattgttatcgtatatctcccagtcacatttattttcccagttattaccccagttttaaaatcgtttgataatcctaactgttgtagagttgcgctatgacccttacgagtttttgggtcctttttttcatagaaaaactcaaaataatctccctttttggttggcattaaattaatttcatctccactctgatatttatccaaaacattgtagtaaaaactcaaatttacatatgaattaatgggcttattttgtacaaattgctctattgcacctaaattgctcctccaagatgaaatataaatcattttgttgtttgaatcaagtgtgatttttgaaattaatcctctagaatacatcaccttgtatccagaaagctcatcattcacagttttgaacagtattatcctaccagtcgtgtgttcagagacaaccaataaagtatgcttttccgacatgaacgcaacagtataaaaatccattgaagatggtttatccagataacctacagctacatagttgttttcagatatgccatcataacttttaaacaaggaaagggaaggtctgggctgcgaagtacttaatttataggtattaatcaagtttttttcagggtccaggcaaaataacttagaattgtctgctggcactccagtctcaacctctgaaagtatgctgttacaataaacatcttctacaaccatcttttttttaacaattatgggagttccagatccaggcactatataagaatagatgactcttttatggccatctgagattaaaaacgtattactattaatcatcgctatgtccaatggattcacaagtaaatgaggaaaaactacttggaaagttaagctggtacgctgaattggaagatcaactactaccgcatatttctcacctagaaaaacaagtgacttttgaaacttcatttccttacacagtatccagcttccctctgtttcattccctacaaaattcataaacaatctgagtttatcctttgacacatttacaactccatttctaacgtcaaacattacagcccaaagcctattattacaatctgacaatataattagttgctcttctttcaaaacacaaagctgaaccaattttttgtaaccagttatagaacaagtttcattcttttcctgattcagattgggtttattttcactattttcacaaccttcgcaatcaaaataaatcaaatcagatgtatagttaatataatatttcttaactctcagaaatccaaaatgtaaccattcgagatttgtcgtttcactttgagagctactagattctttgtcatcttcgtcttctttattttgttctgtttcatttgctgcatttttagacatactaatgcataatttatatgtcccttcttggtgaaccattagtttttcaaacaaaatgcctttactattttctaaaggagccgaatcaattaattgaatgttgtcggttggtgaactattacagttcaaatcaacacttataattgccaatttataaacataatcctttgaaaggttgctacctcgaatgattatgttttgaagtacagctgcccttatgtttaacttttgttttatatatattccacttttgttttgtattaaaaatcttatataatttttagaattaaattcatcgagtccagattcaactatacatgactcataaataaaaccttcattttcagagtatctgccaacgaaattagttgcaaattgggtggcaattttaaggtcaccttcaactctaaatgaataacccactgataaataagaattctcattcttcctggaacaagttttattcaagctatcagaataagaaatgaatattcttagtaacatcgactttatttttggtttagttttatttttaagtatatagccagctgtatcaataaaatcgtgatctgatttacattgttcattgagaataaatgaacaaaaacatatcttgtagagaagagtttttttattcgtttgggtaagcatcagttgaaaagattcccaaatgtattttttattgttaaatgagtaacttttaaccaacccataattgttcttatcgaatttaaaatctgggtctatatcttcgagtagagtggaagttgataataaattatttgacattttcgaggagtttatcttaccgcatttagcgttagaatcaactactctgaattcatcgaaaatggttaattctgaaccaaaataaataagttttattggctcatcagttaattcagttataattgtattaactcctaaatataatttgaagtagataaatataacctgtaaacgatggaaacaacagagttgtcgaatagtctgaaacagatttacaatttttgcctccacaccaacaaagtagtgaatttttaatatttaaatatttgtcaatgttaatgaaagtccttgaaaaattgtaaaatgaatatgttacattttcagaatacggattgaagtcattgttctcacaattaacctcctcatgttctttagaaatgaaagttattagaagtacattgttaaatttactgtaccacttataattcaaaattgtttcaaatattttttgtttatttaggtcattattactaatttgcctaggtcccgttacgagataatcgtttttagtgtaaatatgcttatcgtttaattttacacaaagatgtagcatctgttttatattaactcttctggcattcgcttcatcctttacagacaagagttttgtattgtaattttttgtaataacaattcctgagaagacgataacatcctttccattttcattgtaaattaggtccggctcttccctcattgatattgaaaagtttgtatttaaactggatgtgtctgaacaggttgaaacaacagagaaaaaaatcctggttttatcgttgtaatcatgcgcattcaatgtcaaggtaaaaggcttcccaaagtagactactattttagattggaagaaatatattcctaaattttaatatttaaaatgaatggttaccagatagtgaaatttttgaaaatttaaagtattcattggagagagttttgtagcacaaattataaaaccatggatttaacattgttggcgtcgggctttcatatattgaattatattgaataatataaatattattattcttcgatattacaaccggcgaagttgacttaactaaattcagaacggaacgtacattcgaatgtgaattatcacattgaccctaatcaaaatttacgttagtttaacaagataccttttttattattaaacttgatccatagttaaatttattttgagaagttgttatattaacgaatgttttaaatgttaaatttattatacatttgtgaccataatcacaagaaaatatttcattggaaaacaatattccagatataaaaagttcagatatttcagttttgaagtgctcaataagtccacaatcgtattttgaacttggtttacaccaacatatttttgatgttccataaaataaaaccttttccaatagaattcctctatttctaaatcgtattctttggttgaaactacttcccgatgaattacaatcttcctgaattaaaatataatgttcttcctcgaatcgatctaaattttaattattcttgacaatttatacctttagctttaacaagtagtttcgaatccaaaggaatgtaatattttatcttttcaagttcaaaagctaaacaaatgtttaataataaaatatataaccttttatattgaccgttgtaaataaggaaaaagctgtttttacttcattccttgtccagcaaatttcatacattccaatcatggactctataatccaaaattaagactttaaattactgttcaagttgacattaaaagttattagggttattgtatcccttcctttttggtaatgagtaagctcaaaaatatcacttgtattatctatttctattggttggtggcttgaacaagactttgacaatgacattgttccagtactttttgaataaaaattatttataggtatatcacaaagtgatccaatccaacacgtttgttctgcattaattgaacctaaatgataataatatataatattttaaatcaaactaaagtccaaaagtgatccgacatgaattgtatggtcttcgtaattacaatttcgattttttatgtatatcttagagcagaagcaaagtttaaatacagttccggattgaatctcagcatccacattaattcttgtccaattaaatctggtaaatgaaccatacggttcaatttctgataaaccctcatctgccaaaaattttagaggtggtacatttccacagctttttgagattaaaattctagaatttgaattggaactcgatgttatgttaattgtattcaacttaatactacaattttttgacaaatcacacgatgctcgttgaaaatatgaaacccctagttcatttggtaattaattttaaaatacctcttaaagtaatggtaccaacttcagggtaataattataaacgtcgtcatctctgcattttattctctcatcacaaaaatcgcagtatttgaggacatattcgtagatgttgtcaaaggttatactgaatttgacagaatttgaggttattttgaccttttcctccaaattccataactttgattttgatatttgatctctggtattaaatttctgactgtatatcaaagcgtgtgatcgatcgcagttgaacatttctttgttgttaaaaacgagttcttgggttcctagcggagaaaagtagagctcaccaatataaatacctatatcttatatcatgattaatatcttacttaaaactttaatatatcctaagcatactttaaatttttcatatttgcaatcaggactccagtaaatgacattttcttgctcacttttgacatcagtaatatgcttatctttatccatgtaataaagatatttaccttcagaaactttcaacaatttttcaaaaacgggatcatttgctgatgtggacatgtagtagcaattttttgtattaatatagtttccaggtatttcaataatacaatcaattccaactacacattttaatgcaaaaaacgagtcgattacagggcctgaagatgaaataaatatactatttattaccatctacatccatattgcagagttttttgtcgtatttcgaatcatcgtcacaaacgtccttgtcacaataacataatacaggattagttaagaatttgaccaatgactcgccagaaatgtatgttacagaccattgacctgggaataaaattataatttattttaccttcatttatttttttgaagcccttttttgataaagagcccattgatatcataggaccagaacaatctttgttcttaagtgctataaacaggtgtttatttgtgttagatggattttcattcagtggtagatacaatgttgcatttttcttccatggaattccaaatgtaatagaatcagtcaattttgaaactccaattcctaaaaccctataaatgttaaaaacaagcctgagtattctattgttgctattttttcatattttccttcagtgttttttgagcacaaaatcattggagaattatttccttcgtactttaaatcaggatcaagcagtttcattttataactacagtctgtttttgaattaacgtattcttttacgtataatttaaaccctttatgatttgggggaatcttatctgccagctcacatggtccatattgcgatatattgcaaatgatttttaataagtctaaattttaaaattaggattaattaactaacctgtggatttagagtcttttacaaataaaataaatacaaataattgtgtaagaaaaattttattcatttattcaggcataaaataatgtgtaataatattaacataattagattcatgtcacttgtaatttaaaaatagagtcgactttattcttgttagaaactacacctgatcgtctcttggctgctgatttcctttgcaattttgatatcgaatctagtatttcatcattggtcaaattttctgataaaactttttcgaccccggctttcagggctgagactcttgaaaatctagttactagtgagttcatttgattcttttcttcttcttcagactctttaagttcttggacatctttcttcagactctcaagctcagctgttcttttgtgtttttctgacattttggctccgtaaaccccctcatgttctacaccctctacaagtttatctatttcactttgtattaatttaaccttggttttctttattcgtgtgctgaaagttctaataaaatcaagatattcaacataaatttcatagattcttactaactcagatttgtctatacgtctgagtgttatcaaggaataataaaattgggagagcgttactggtccgtcatcgtagaattgttcaaataatacatccacaagcaaagttgctgaaatgtggtcaaaacaataatctaaagttttatattgtaattcttcgcatgtttcatcacagggttctgatcgatgagagtaagtcacatgggattttattgtgttgaacgggtaatttaacaaaaacaacttggcaagacccttgtatttcttattgaaaaggtataaatacagcacatactcaattatctcatcttttgtaatgtttttagagaaaatatcaatcttcatacatctggaaatccagattataagcctgatgtagaagtagaaaatggtcggagacaatctatttatgtttttgtgtgatttgcaaagctttaaaacctctgttaagcatggaattaaaaaggttttgtcacggtaagtagatgtagagtcaattattgaatttattcgtttctttttagaaacgttgtaagcttcaaataccatggtgtcatcatccggattgaagtagagtaatgagtggttatgtttaaaaaatgataaaaaagacaatgtgaaatttctccaaaaatattctttgggtctcgatataacacaacaaactgttataaactccctcaatagagttaagaaaattaacaaatatgacaacgctgaagctataaacggcagtcccgtaacaattgaaaaattgtaaaaatatgatccgtacattaacgtagatgaaaaaatgtttgaagccatcaaatatttttctaaattataaaatacgaagtccgatctcgagtcatatggcttaaatacgaatattagttcaaggtagacaaagtgaattattaggtaaaacaaaattctgttaatttcagatttattagagtctattgaatgcctacatactataaggaaaatgattaggatatgtcttgacaattgaataacatcccagtttctgtgtttttttctgtaaccagtaataaatatatttccccatccctgggtgtactcacaattcttgaatttaatgaacaaaaatataagtaatataaaaataaagcctaatgacgatgcactaactatagagccaaacaaaaagtttctatttgcaaacgtacatatttgatttggcatgtgcagtagcacataaccttctcttagtgggaattttgtataccatataatagaaagtgaatttaaagctaaagacggtaaatgtaaacatatcaagaccattatgtgttgaaacagtattccagacggtttctcaaattttatttctttctcatcatgaaatcttgatagagaaacatcactcgggccaatttttattctaagcattttaagccgccttttgagcgaccttttaaatatagagaatgttatatttagtatgtaaaaaacgaaatcgagtatgaaaataaatataatgtcaaatataagcttaaatattccaaagtacctttgcaggtaccaaatttctatatagttcaattcactcagttttgggacttttttcgcaaaaccaaagtgatttaaaatatattctatatatactgacaggtttctgaagcaattgattcgatctacatgtgcatagaagtttattggatggtaaaagaatttttcataaaagctataaaattttctaatggtagaaggcgagtttgaagggatgattcctaaggggacaagtgatattgtatagctgtatagaattttgaaaatggttaccaaggataactcagaggtactgttggctcgtttgttataaaggcagagtaaaattattatggtatacaaggtaattctagggataataattttaatcagctcctttatagtgcctgaacattttttgcacttggaattaaaatgataaagatcataacctagatcgcactctgtgcaaaggagtccggaggagccttccgaacactttcctcctgatacacagcgagctggagtaacacaaggatatgttaatctggttgtatcacttctgactagagaagtattattttgagatgaaatttgaagcaaggagctagaggattcatatctaatatagtttatatctactattgcatatccactttttggaatgggtttggtgtggataccattttgcataccaccgtaacaaatagaaccatatgggcattttttacactgaaacttaccattttcaaaatcataataaaatcctggtatgcaaaaacaatcttctttactttgagatccgggcagtgatgaggaatacattggacatgcttcatggcaaggttcgttttgatgtgatgatttgaaagttccaggtaaacatttttcacattctaatccaaatcctgagtccaaatcacttcctaatggttttattccatatcctgggttacacatacatgaggttgtggattcattatcaggagaaaacgggaccgaggatccagcaaaacatggaactggtggcatgtggacctttggaaacatccacattcccttacagaaatatccataaaggcatattgagcaataaaaatttaacttggtgttaactaaatcctttacattttcactaaataaccaatcaatatccaaaggtttttcattaatatccttcgcgtcgtgctcatgtacatcaacgatatttgagtgtatgagcctatttgttggtgtattactttttagttgcgggaacgatgctgcatatttgttctttatacaggtacattgattaatgaaaaatgaaccttccattggagttgttgtatttgaagggcattttgtacagagttcatttgatagtgttggcttataacttcccttcttgcacgggacgcaaacgttatcgtatgggtaatatcctggtagacatagacaatcatcgggtctcgatgacccctcaaatagtgttacagagtttaaaggacacttgatcttgggtgcgtcgagaccgccagggcagtaatagtttctgggacaaagaagaaaggttgggtatacgtaatcccttataatctcacatataactggtcctaaaaattaaatgaagtaatatgcataccatggttgtcatccctaatggtgacggggttgtctttaattattttaggtattatatgaccgaaagttgtatataaggaacaaaaattttcttttgggcgttcacttgatcctgcgaactgtgtgaacctatagtagtgagcatacttgcaataagggttaagtttacacagttctacgcaagattcaagactttctctcaatatcataacggatggtgagataagttctacgctcttgtaacagtgtactttaaaggactgtagaataatctcattgtaaaaattgtaattcgactcgatgttttgggccataatcttgtaatcatcaaaaagattgaaatatcctggtagtggtatacagtgaagcaatgaagtcgacccttctttcagagtatatgtgttttctgggcactttatgcaagaggcttgagttccatctattggttgaaatgtgtttaatgggcacttaatgcagtttctagacgtagatccagccaaggctatagtagtgaatccatgcccttctggacacatacagtcgtcttgagaactcggatttcctaaatgttgtttaaataaatatcacgttaataaataagtaattaattgtgtaaaatacttttagtaactattgagttggctccacatgatattggatcgaaattaaatcctttacagaatgatttatctgggcattgaacgcaagatgttccgttgaaataaaagccaggcatacaatttctgcattgatatttacttgttgatcctgggctcttagtgtatgcataaacaccttctggagtgtctgaagaacacaaagtacatttttcatttgaaatggctgatttgtaggaataaatgttacaaggtttgcacccatcttctgttaattcataacctgggttacagagacattcacttattgatgtgcttcgaggtcctaatgtagaggtattttctggacaattataaactacattttttcctggacagtaagttccctgctggcattcttcgcattgtccattcttatcaaagtaaccaggaatacatatacattttagctcttcacgtgatgaagctcctaccacagaactaatttgatttggtagacatgttttatcacaagaaattgctcctagctcgtcattatactttccttctgggcacttgatacatgttttggtattgctataaaatccgggtttacaaagacaatccagaggactagatgaagctacacctttcgttgtcgtattaggcatataatcttcacatcttaaacaggtatctagggttaaaatatgtctataaaatcctatttggcattcggagcactctctaaatgctggagagtactcatatccaagcgggcacctcgaaattagtttaagaggtaccgaggtcttaccgagtagaaaatctacgtgaataactacttcatagtatcctctaaaacgacatgttccggaaatttctcctgttgaacggttcaattttaatcctgtatttggtatttcttcttctgcaacgttgtcatcttcagtatatttagatatataaaacctcaatggtatgccatttgatatttctggttgaagggaatactcaatgttgaacctaagatcagttaattctggatattttactgaaacttcaagcaagttgtcgtactctatctgaataacatattggagaaactggttttcaaaggaaatggtgttcaatgacataatatgggtttttgttgttataaaatctatggttccaggaatacttgttacaattgaatagtactttattttatggtcatctagataaaaaaccttgatttcatcagattcttgatgactcagaaatataataaaccggtcctgattagccacggttctggttgatacgtttaatctaactccatgcgttactccagggaaaaaatctttaacatcaatggcatcgacctttttggcaaggtgggtttttttactttcaaaatcaagttctattttataataatccaaagacaaatcttcagttatcagaaaacatgaataaattttatcagacaccttataaatatatacgtttttgatatcatgatgtggtggaatttgtatagaacccaactcctgaagttctttattgaattttatagtttttgtctcttccacttttgggccagctatttcggcgcttatcaaatgcccgattcttgattcaccagtagaaacataaacatgttctgaagataagaaaaatgtagcatctgaaaatgagaacatcatttccatgttatgtattccagaaatgataattcttggttctggcccatcttcgtatacatagactgaatttggtgataataagcacattagtttattttcttcgtcaaatgatatgtgattgatttgaactagtggtacatttattttgacaacagatttgaatgaagtttcaagattatcagtctgtgtaaaacatgatagtttcctcttattataaaagcaaatacgaactccatatataaatctaccataaaaatcattagacttaataatttgattaagttctaaagactgcattttagattcagatgcaattcctgcgaaatagcaacccttctgtacacatgaacatactttgtaaattctatctttcggtgtaaattcaccaaaataactaatataatttccaaatgaaatccaacgacgcccatcattagggagccaaaatcctccctggtctctagattcacttatctgttctttgtatgtgtaattttctgtaacaaaggttatgaaacttgagtactgatttgcagatgtagatatgttggttaattctgttggtttaagcattttacaattaaatgagaagtcatttgaaaagaaaaatctcacagaataagtaacaccagggaatcctgttgttgggaccaggatcttaatcgcgtcattctgtctattgattataaaatgcgtgccggaaagaggtgtttgggtattaattattccgataaagtcccaagatacttcatatttcacatcaaattctataattttatcaggtaaggtagtttgttttgaatgcatttcggtaattttttgtgaaagttctttgtgtgatttaggatttattaaacaaacgtaatatattttacctggtgttaatcccttaaaagtgttggtataatatttccatgagtctttaactctatgactatatgaatgtggataaactccctttctgtcattgcatattgtttggtagtctgtatactgactgtttcttgacataattagtttaactaaaaattgttctgaagaactagttttgatttcggctatcatatctccatcctcccattttgctttaatttctaaaaagcttctttttgatgggtaaactattcccataactgaatcaaactgatcttctgtaaagcaaaatgtatgcttccaacggtcacaggctagaattacatatgggtaacggttatccacgtacaatctgggcaaaaacatactatatttaatccatttggttccagaggcggatttaatactcttgtctggtaaatatacaagtttatttggaataaaatcatcaaaaagaacatttttgtagtataatgaacggtatagatcatctgtgttatatgacaaattaaaattatattttgtgaggacggtgttgtgaccgattttatggtcatcattactgcaattctggatatcgaatactgacctaggtacttttgagtcggctactctagatactgccgaattatcctctaaatcacaagcgtgaactaacattatttcactcagtgggtgaaaatctgaatttaaggtaatttctgctattcccattgggtttgaatagaatacatttttaaagtatccagaggttttatcatttacctcaaaagtataaagaggtattttgtgttctggagatttgtcacctttgaatgaggcacatattctcacctttttgccgtaaagatctaatggaagtagaaatataattccttcaggagttattttatgaaatatgtgttctatcttccactgtaaatttttatctccgcacctgctcgggagtccgtcaatatcttcagcagactgagcacttaagaaaaatttgtcactagaaagcttccacatatgatcaccttcattaaaaggtttcggattttttaattttatttctgcgaggatatgtttgtcaagtaccttatgttcaaaagaagatatgttactatgattaaatacagttattctgtacaacaatgtaggaaggttagtatcgttctcgaaaaaaagaaaaatgtaaacaacactgaatgggtcagattgttctatgaaactgtttaaggagacatatgaaacaagtttattgttacataatgtaaaatttagagtttcagtaggatttctatattcatacttcttagaaactacaagttttacacgtttttgatcatagttacccaaaattatccctaaatcgttattatcgtcgattgaataaaatgtagaaagtcttataaagtaaatatgtttgtcttcataactattggattttttaggtcgattgtctaaacatattcttccttttggaaggtgccaattatcgcgcttaaaaagtgctttataatagtttaattttagcttaggcgggtcaggtggtacatctgttacgtcatcaaatataagatcgaatttttcagttttttcatttttaaagcagttatcagaaaagtttatataggcgttttttggtttataattgagttttaatcttaaatcacattcggtatcataaagacaaacataaatgaaatccaatgggtcaggtattggtgtagaaaagacatgtgataatttaaaaattaaaaacaatattagaaacttaaataccttcatttgtattttcattaatgtgttgaataaaaagaatgatttaaaaaaatatagaaatgtttttaaaaggttaattaaaaataaatgttataaaattttaatatttaatgattgaaacagaaaatatatacaattaataatagaaatacagaaagttattcaaatgtgtaagatataatataatgtcaagatgtatacacaccaacgaagaaaaatggggaaatgaaaagattaaatttacagaattctaatatttaaatatctttttacactgttatatttaattttaaataatattcttttcatttgtatattaattttggccctttttgtaattttatataaaatattattgattccttattttaaaagtgattacactttgtatttttatatttaacatctaaccatggtataaattaaattttaatgaaattcgttgttgtggctgtccccggagtcatttctcccgagtattttcactattgcccattatttttaattttagttcaaatggcgacgagattcttagagcaatcgggggaaaggaaggcttacgttcagttttaaatggagaaaaatcaggtatttatttttccattttatttataatttagaacaactgatattgaggtttggaattgactcaacaagtagtttcgttccagccaacacatatgaagataacattccctgtaaattagtggcaaaagccaagctttggaagtctggaaaatgtactatagaattgttggggccggttgtagattacttttcattttcacacccttcggacttccttcacttaagtctacaacctgtcgtagctggagaactggttggtgacagattaccatcaaacgtaccaactatccctccaccgattttcaccaagattgatatgatcgatcaattgtttaataagagtttgtcaagtggttctaccccttctactacccagaaggttaaaaagtacgcttctggctcaatattcagctcagtagctcgttttgaagacactaatgttccactaactccactaaatcttgctctgccatctccaggtaattaaatccagaaccataaagtttagatccaaccttgatgagttatatggaaaacttgtttaataaaagaaaactctggctgaggagtgcattagatgaatttttacctgtaggatattccaactggaagaagagaacggcattttcaagaatatgttatttattctcaggtaaataaattggaatatgagtatttagatggtccatggagaggatgcatgtgtaaaataggctatgatccaagaaaggatatagaatcgagattctatcaggtatgcattcccttcactaaaaattttcagaccattgatttcagagatccacactatagaacaatttcttggaaaaccgggaggcgttcactgtcaaaccctgaaaatctaggccatgaacttactatagataaggagaagacatatggagaactttccaaagaagttataacaccgaaccctgaagttcatttcttaattccttcaaacaggccttcacaattgtaccaattgtgtgatatatgtgacgccgggatacagaatatagtacactcaactgatttttcaagcggaattttgaacaatgaatgctccaaatctacaggtaagccactataccctaaaatatatttgaaggatggtattccgtgtcagccctaactaaaataagggatatgatggtcgtaaagtcacttcgcatgagacatcaacacaaccaactagtcacaaattaataattttttaatttttgtattatatcacatgtacattatttctattttgttttaaaatgaaagatgaagaggatttagaattcaggagatgcgtaaaccatattctgtcaaactcgacaaagcaagataatttcctcaagtgtatcgaccttcttgggattaaaactaaccaatttaatataatacacgttagcggaacgaatggaaagtcttccgtggcattcaaggtctcaaaatgcctggtttctctgggtatattgctaaatttttaaattttttgtaatttcagggttaaaagtcggcttgttcacatctccgcatatttttgagtatactgaaaggattagagtgcaatgtgtacagatttcaaaatcggactttgttaggatcactgattacatcttctctgttattggggatatacctattcatttcttctccgtaagaatttacactttttcactctaataaatgtttttagtcagtgctcttgatatctttggtgtatttcgttgaaaaaaacgtagaatgggtcgttctcgaatctgggataggaggccttcttgaccctaccaactttgcacctaacacaaaggcagtagttatatcctcaattggtttgtttacgatatttacattccgaacataggctacgaccatatggcaatcctagggaaaacacttgacgaaatagctcatcagaaggctgggactataaaacctggctcagttgtagttcttgggccgaactgctataaagatgagatttttgaaagtaaggctaaggaagtcggagctaaagtgataaagaataacaagaaagacttcgaatccttcgatgaagagaatacagaaactgccaggtacctgttcacataacacctgttttcattataatccagactggttgttgaggaagcattgggattagggaaagctaatatttctgcgctcaattcaaggctgaagatgaggctgaaaatactctccagggaggaatgtgaagtggtcaagaaccatgttttttctaaatatccttcacttgttcctaaattgaccgaatatggtattcccaaggctgttgttcttgacattgcccataacaatactgcaatcaatagactctgctccgtaattttacacatgaattcaaattaatatttttaggatttattcaaagtttttaccgggaatgctgttttttgtgtttcaatttcacaaaataggaccttgaatattttcaaccctcttggctcatttttgaagagagataatccctcaaaaccttcaattgaggttttgtatttggatgtaaaccattcatattgtcgaatgcttgaagatgtaaaccatgatttggataaccctgacttatctcccgagtatctaatagataataaataaatatgtaaataaattttcagtgtaaagaagattttcaagtctggcctggataagacaagacaaatttgttccacagagtctagtggatttaaccactctaatgcagttttgggtaagtaaatgtataaaacatatcatgaatagacgattttgataaagttttgtatagtgcgttcattgaatcctgcaagaatggcgatattcttgtactgactggtaccgcgtacatgatggagcaatcttttaaatctctgggttctagtttctaggtgttaatctcttcctctttagtttatttcttcttagtttcttgagtgttgcgatcctagtgtttgttattactgatacggctgcatgtttctttttaactagtcttgacttcaggacaaaggtccttgcaaagctcaggagtttaagatattccagtggcgtattattcttattgaaccagttttctatattttctaaaacaccggaagccttatctgcatgtttagtatcaggttctcttttattccttgacttgtgactgattcctgggggcttcgtgtgtgcaactctgaatagtgcaatcatcagcttcaagagcataactctatttcttggctcatatactacctccattgtggccagatgtgagaaaatctccaaaagcacatttagtctatgtgtacattcagactttcttccgaggttacacctcagaatgtaacacagctttgaaaccattctctcgagtgatttatccttaaaattttccaagacatttatggaatttataaatacttcctgggttgcctgttccaattttctgtgcctttcaattgatccaaagtatgtcgacaagtttctgaaacttgacttcagtagtataaacactcggacactaaagttgggtatgagttcttgtaacttcttggtaggtaaaacttgagaaaataccctaagacttgatgcgagtatccacggatgctgtgatgagagtcctgaatttaatacaaaattccaaattcttgaggcaggttctctacttaactcaaactgtagtgtgagaaaatgttccaaaagctttagccaataataacaattctgccagtgatcattattgatttcacctataaaactactcaacggtttcaggtttaatttattaattttatggagtgacttttcattcttgagtgccaagtatacaaaaaatgaaaatgccaagtgtacatgacttttcatcttccttacaaagtgtgataccatgtccaaaagttcattcttgttttctctgcttcctgttgaccaaatgtttgtgactagtatttgtaacagcttcctgcaacttgtatcatcttcagacaccagttgtggtaaaactgccactaccaccaagtttgcatatcttttccaaaccactggacttgacaattccctctaaacaataaactgaatgtaaaaattgtataatataggttttaattggtattgtgatatctatatataaataacatagataatgatatatggataactggtataaatgtctaaagataccatgatgattgtgagtgttttgatggtgactaatctgacttgtgggtctgaggagtttatatgtttgagtaaaagtgagaatctctttgatctcatgctttcatccatcggtaaaagtataaatgagtatccaactacctttgaaaccgacgatattgacctggttgatatgttcccttttaacattctgatcattacttcatacgttactttgtaaaactctttattaaagtatacacttaaattttcgttatctgctattccattctttgcttccttggctttgtatccatttaacaatttgggctcacctaaagacttttgacttgacaaaatattattcgcgttggtagaagttatggtaaatgtatttgttctaattgttgattggatcagagttatcaagagtttcaggagtgacgtatgtagtcttggcctgtttaagttagtctcaatttggagtaataaacactccattaactttccacttcttttggacatatcccaagcttcttgtattatgtccaaatatttattcttgaagaatagtgacatgagtgctatatggtcttttgcaagttcttctgaacctactaaatccagtgatcccatcctttcaactaaatttatggccaaaactagtccgaaatcctcaattaactcaggtctcgacttacacaactttaacaaacagctacaactcgacttttgaagaatcacctcttcacttaaaaaactcaccagtacactaaattcacaaagacgataacgagttttggggtctaattctgtggtttcacggtccagaacactattttcagatactgtgttactagttttatggtctagatcatgattatccaattgatttaatgtattattagacacattgggttcggtatcggtagagcttactatattaccaaataagcgtatagatgagttgacaaataagggagcaaagatatggttttcaaacccgggtttcttcatggatgattctagggatctacctgttgaggcacctggcattaccgtaaatctttcagtcaattttgagtaataaccttttttagcgggttcatcttccactgatttcggttctggctttgatagttcgaaataatcaccaaaaacataatcaggagttgacatgtatttgctatacaactcaaggatatcttttggaaactgtgaaatgttatcttcaatccctcgcacctttgataacattgtcataaataacttaaaacaaactgtagtcttatctatactcttattaactataacgcctgatgtggctgaaactatcaattcattgattttcctcaaaaatttatcagaatactccaaaagactcaccttgggactcaacaactttccatttaaaagtgaggtcagaaacgtaaaattctgttcaacaacttccaaagtcgcatactgtgaaatcagagaaataagttgtggtgatttcggatgtcttgcttcatctatttttgattttgagtcatctttttcctgcactctcgatatctcatccaatatcatagtgtacaaaagcttaagttggtttcctgagcccaacacattctcgtcatctagtactttgttcaaaattgaataaattgtaaaaattaacactgagcacttgtatcccctggtcatgttcgtgaacaactccctaataaacacgtcaatatactttgttttaaacggtcttgccagcttaattagtgatattcttgccagcctcctgacgtctctgtttctagatactagaaacttggccaacaccctagtatgcagtatcaactccttattgattatagattccgggtaatattggagcaagtaacctatacactcaaaaacttccaccaccggaacatctccttgcttcttctttccctgcacaacactcatcttcttcaacttggataatataaggccaactcccagtgtatctttaaatggttctgctctagctgaggaattctcttgtttttctgaccctttcaagcccatgttatgtgaataaagctctacaaccttcaactttgtaattgacgagaaaatctgtaaaacaattgttagtttacaggaatcatagattttcagcagttttttcagtatctttatgaaggaatgtactggcaagagatgacatgatgaaatcaagcattgtttagaggcttcagataaagccaaattcctcaccgtgttcctttgaattaggtactgggtacacagtggaattatcagcttcagcaatgtagcgtttgagaaacagttcgactcaacaagtgcttgcaaactcctcaaccctctagacctcttaaacttttgcaattccctcatactatggaggtggtcagccacaactgggtttgacaacaaatctgaatgtaaatctgagaacaaaaccgagttagaattcaatatagtagaaaatagcctcacatactgctctaaaatctccagacataagcaaatcagtgaatcttcagaatttcctcccaaacaccgacgtatgaatgggaataacgtgtttgaaaacaagtatgttggttcggaatacttgccatagtctagacacactggttctactaatctaaatttaacaatctcaagaactttaaatgacagtgctgccactgacctccttactcctggatcaccttggtgactccataacaagaagaatgaatgtgttaacagtgtatcaacacacctaagtgacaagtttttactatccaggtcttgtatgatttctgagatgatttccacattctggtccaaatccagcctcaactcaactgatactttattcattgcacataacctttcacccgtatatccaactccctcatctaaaatattgttaattcagttaaatattgttaaataatattaattctgtaaaatattgttaaatagtctaaagcattgttgaatggtgtaaagcattaaatagtgttaaattaccttttgatggtattttaggtatgagtgaggacgcgtaatgtctacatctgttatctggcaccagtgataacacattgtttatgaactcccatatatgttctagtgactctgtatcttttggctccagtaatgatatgcatgtttcaagggaatttagtatctttttccatagttccaaatcactctttgagtttagtttcagtgatgtattcatttcagttcttgatggtaatgacgagatgaatattgacaacgccttttgttttacttcgttgtcaagatccaagactacaatgtatgagagtaggttacattcatattttcctgaactacacattgaatctagcaaagcctctgatgaatttatcattaatgttttcatttcagtgttttctgtcaagtcattctttttcaaatgattcggatacaggttatatatgttattcgccagagttaagtgtttttgtgttaacttcgactggaaaactgacggaaacaaatccttaataacttttgtgcaaaatgactctatataatccatctgagatgtgcatattaaaacgaaatcgagcccaaccaccttaatgagttctactattgtcttggaatgcctggacaatatttcaaagaagtgccctgttccaaatattcttaccagctcaatcatgattttaaacgtacgttctactgtaatcttcgagtctgaagactgaaactcacggttttcctcaaggagtaaacagcaaaactccattatcttcagagcctggggtttcaaatgattcactagtctcttaattatcaaattcagtgttgtcaagacatttggtaagttaaaattactcttttcaacacttgtaaacttcagtgcatcaaccatccaattgtatgcctcgtcactttcatctttgaataggcttgaatacttatttggcaccaactccataatcagcaagttaacatactttgggtcaaaatttaagaaataatcaacaattgtgttcccgtgtgatacatttgagtattgatatattcttggtactataagcctaatttctattccaattgacagatttaagttctttctgtcctctggagtctcacatgccatttccgaatattcatacttcttagtcaatgctgatatctgctggaagttccccgtgcacatttctgaaagtctttttacatcaattttatgcctttttgaaataatcaccagacttgactcacggatttttggatccttggacctcaagcctgcagttacacatgctctaaaaagctggtcggggtaattttccttgttaaatttattgaaaagctcactaagtgtacatagagaattcttcaaaaactcgctgttcttttcaaaatgctctaaagtgtaatttactaaatcttccagctttgattccctatccttaactgctgatatgatttgaaatataaccttgagaagatgaaattggattgtgatggcatccgttctttctctacttgtgtaattcagtgctgattccaatattttattatcaaattcctctaatcttaattgtttaaaattgcaaaatttcaacatctccatgtacaagtcccatgtgggcttcagagacttttcataacccttaagcttagaaattaaaaccatgttggcactgtatgcaccttcccatagtggagaaaacttaacatagtattgactaagtaaaatcttcttaatcaacacaataaagagctcatattcaggagccctaattgactcgaaatcaattagatttacagttctagacattatcatacactttttcctcgaggtttcaatatcgttagccatcatctccatctccaacaactcgtttaaatgatctgacacgggggaattcaacttcttatagtgcagctgtaccagcttaataacattaattctcagaaattcattctcatttggtaaccttttcattatcaaatccattactgaatccaaggtgtcattaaaatttgaaactaaaaactcaagtaaaaagtaattgtcaaataaatccaatttcgaagaaactgctatcaatttctcaatccacgcactcttgtcaccctctatcaactcaaaccctatagtataaattttaaataaaactcttggatcatatcccgcttcaagacctcttaaaacctgagctagtgtcctttccattaactcatttgcattttcaattttagacgcttttgacttaattctcaccttgttaatacatgataacccgtaaattattccaaataaattcaaaaatgactccatactaatgtcatattccatctgtacaagcaggtctatacactccagtacccttttaagtatcgaagggttcacaatgagtgggtgaaatatatccttattgtacaaaatgcttgagaatactaatagtatatgtgatacctgggtcaggttatttgttttaagtcgccattcaaacagggatagaaatgaatttatgttattcattcccaccagattatgatcaacattcgttagaaacagactgaaatctctatcaaatgtcttagttgagtctgtatctgaccgtactaccctcaggagataactacatatatcttcaaacagttgcggtcttccactgtttgaaaaccttaacagtggtgctataaagtcactcagcataatactgaagtaatctccgactgtgatgagtgggtagtttttaaccgttgtaaatttggtttcattgaaggtcattaacatttctatattcaactccagcactatacaaactgatttaaatcctattttacagtattgtgataatatttccagattttgtgataactccaatttttgtgataactcaaatttttgtgataactcaaatttttgtgataaaatgtccaaattttgtgataacaattccagattcgtctggtatgaattttttagccatgataaatctaccttactgtccttagcgtgtgttgacatgagtagtattgtcttcctgatattttctgcaactttttcaagatcctcagttctgtttggtatgagatcctcaaacatgaacgtgaacaatgacttcagtttactcgtgaaatttccatctatattctgaataattgaaaagataaccttctcagatccatccctatggtaaattaatgtattacataacttacatgcttatacagagtgatataacttgcttaatgattgggattggtgctcttctcagtaacatacccaaagattccattgataatctcttgataagttgattgcttgaatttagccattgcataaaatcctttaaaacaaatccaaggttggtcaaaatataagttgtgtgtactctaaaaaagttattatatggtaaactaacctgaaatatgtcagtatgaatgtgaaaatcggcttagaattcaggttagtgttcaactcgataatctcaagtaactcatcaaatggtacatttaagcaatatttaatcccaaaatcctaaacttttattaattttcttaaaggtaccttgaagtaagctgccatgatcctacaaagataatccagctcagttggagaagcatctttgcagcaatttagcagaatatcaactggtttttggaaatattcataactcttttcatttaaatcagttacaaagtctaaattctgaaaaaactctgacttttgtaactctctgagctgattttgaaacttgagaacatcctttactcttagtatatttgttaaagtaactttaaagcatctgggcggtccaaattcatctataattcatttttatatgtagaaggataggtataactaagtttaccaaggtacccttagaagtaaatgaaactatgtcgtcatatgcagaaagtacgagcgattttgcgattttagaggatgattgaaatttaaatcgctttctttcacccatttttatccgattttaggtgaaattcgtgtaatatggttagatctagggtcatagatatttatctttaaactgaggcttaaaatgtaacatatattgtatgaaattgtcattttaaaattatttattaatatttgagtctttggtatttttttgtgaatttcttaaagaatttaagtgacgttcgtggagtagaaataacaactgtgcttgggttcgttttgcatttttctttgaatcaggtaaaagtgtgggatctttaacttttatacactcttctattttcactagaacttttcgaatcttcctaatttcctacaattattattaatgtgttagataacatagaatcttacctcttccagttcctcatttgacttctccctccaatacttggctttgcgatattttatacagtttgggtcataatttttataattggccgtatgtattacagtttcaattgacgtacgactgtttaagcgaaattgtgtgtcaaaagtccttctatttaaattttgataatttaaactcaataatccatagtctttattattaactttaatgtttgagttggaatttgtgataaaacaagtagttttttgagggaaatatgttacaaatattatgagaaaaataagtttatataacggaaaaactgggccattgagattatttaataaaaaattactcattataacatcattataaatgttaatttacaatttccatgatattattatatatgaaatccacagtgtgttaggcattaacatataaaatggtgattcatactaaataacagttatttctttctttactttagtggaattttaaaatgtatttaattgtaaataataatttatatcttcttagattatgattggaagattccatatcgcaaccaagaatattaatcttctatcctcccttcaagattctgtaacttgtattaacaaagttcacttatcaaaattgttaaatttacatgaaaacaatgttataaatcccagtgactacagaaatttaatttattatttatctcaagctcctgataagctcaggttaaatgaagttaacacccttgtaaaggggatgttgtacactaaatataaaccagactcttatttttttgataaaatcatgtcaaatttgggtaggaattaccaggaaaatccgctcctgtcagttgatacattttattatttacttctcctaaatcatgaagatgtttctccagatgaatgtgtagagtttcttgataactttaggatatctgctgatctatacgttcaattaaaactgttaaacgtattctacgctatacaattttaccactcacacattcaagagagttacactcctgaaattgaaaactttgtaaaatatttaaggctaatctcacctaaacttaagttaaagtgtggaatcaaagaggaatcgaaggaaattaaacaagttaaatcaacaatggatagtttaaacttggaatatttttcagcaataacaggtaccaaattgtagaaataacaattttaggccacatatacagtccgataattttaaaaaatactaatatggcaattgaaatgagatacgaaaggttttaacaaataactaataatgtgttttagggataaataccttgaatccgaggattccttaccaacaatacaactgtaagccttaacatattttgaaggttttattgatttaggaaacagcttattatgagggatttgggctggagagttcgtttcattcccttcgagcgttggaaacacaattccacgggtaaatttcatttaatttatgaaaaattaattttcttagattttgagaggagaaaatatttatctaaatttgtcagtgaattttatgtcgagacccaatttaccgagaatccaccgtgggtgattaatattaaaacgacatcacacattaaaaaataactctgtaaaatgtaacataatttaaattttttaatatatttcaatttttaaaaatttattgccttttaaaaaaatgtataaaataattttaagggtgatttttcttcttttttacattggctacactgtggtgaatgtgtgtattaatattacctacatttggggttaaatttaatattttaggttttcgggttctgggaaactgatttcgtaaaggattcgaagagtatgccatctattgaaattaaactcgctcctcctgaaaatgtaatttaacccttaatatgtgcggatataaattatgtgtagccactgcctcaagttgaggaggaaataaagttactggagtcaaatcgcattgaacttgaagaggtaagtgatactgtgtgtatgtgtttcagggtatgatgtcaagacttgagcaggagtataataatgcccttatgaactctaaagagaagataaaaacagtcataaacgatgttagtttgttgataattttaatcatttagagcctgtctgtttttgataataaggaattaattgcggagttattatccaaatacgctcatcaagatcataaatccaagtacagccaattatggatacataattgtttagaaatgttggaggagtgtcatttctacaaactgatgaagcttatgttccaagctcagttagggtcatggtactttaatacgtaaatttaatttattagatgtccgaagttgagcctccagatccttcaataaaggagaaaatggttagtccaccaatcctagtaatagattttaggaccaaattgagcaagcgagaaatgatgaggaaatccaagagttttatcaagagtctagggaatttgaacaactaactcaagttacgctaattggtacagagtaacattagaatttaatactttagaacttcagaaggtgctacaactacaacttaacccttacctaatcgagacggaagttggtttaacactcgagtaattttattttagaaactgaaaaccgcgtttcaacactttgatcaggggaatgtgtacaatgtgaatcatggaaattacgccaatcctgtatcatttcttcaaacccaagcctcagacttatctgaaatacgtcaattaaatgtaaaaatcggacagtctgacacaccgtacgccattaacacatttccactaacatatttaaattcaataactgagtgacttaaattcaataactgagtggcttaaattcaataactgagtaacaatggtttagatatccaactgttgaggattatgtaatgaatatggagaagaaacgagacgtttctgagaaattagtatggaattatataataaaaatacatttaggcgaggaataaaatcttaaatatgtacttgaacttgatgaaggtagtggaatatcgaagttaaaatccaattttaggctcaacatgagatgatcgcagatgagttacaccaagctgtcagcagggtaatatcccaatacagcggaatagtagaagaagcaaataaaggaacatttaacaaatcatcaccaaaacaagaaatgaataataaaaacaatgaaactcaaaaatctacgacataatattattttataaaccaaattttattttgtattaaatgttgtggattctatctgtttatggcacacattttaataaatatttaatttatggtatggaaagtgatgataaagtttctggcggttttaattgtagtagaaaacttgtgattattgtcggaccgaccgccagtggcaaaaccaagtttagcgtcgatttttgtaaaaaattaaaggattttaacataaattctgagataattaactcagactcaatgcaagtaattatattcaatgatttattaattttacacctacacaatgaatgcataggtttataaagggtttaatattggaactgctaaaccttctgaagatgaattaagcttgatacctcatcacctgttaaatttcgttgatcctactgaagattataacgtttctatgttcgttaaggactgttctcacttggtattattgatctatttcaatgatttttagataaatgttctcttttctgagaataagttacctgtaattgttggaggcactaatttatacattgaagcactcttatggccatctgtcatggactctaaccacaacagtagtttgctatttatcttatttttatcagattctgagagtttggaagagtattttgatgaacttgacactcggacactttataatttattgactgaaattgaccctgaaagagccaaacaattacatcaaaacgaccgtaaaaggatattacgaagtttagatatttatcactcacaaggtattactcacactaacctcattaaactccgtaaagaccaaaaacataaagagggaattaggtaactctacacatcacttgataaaacattgactgattagatatgatccgctggtgttaattttaaaatctgatcctgagattcacagactaaggattaaagaaagagttcaatctatgctcaaggtaaaccccttgaaatattaatcaaattttagtctggtatcctaagagagtgtaaagaactacttcatctaaaaggtattcaatacataaacttaatcctcccagagtctaaccaggacttaaatactaagaaaggaatttttcaaagcatcggtacgtaacaacataacaacataacaacataacaacataataacataacaacgtaataacaattatgaactcaacttatctaaattttagcatataaggaactgatacctttaataaattattctggattcaatgatccttctgaagaactgctggacaagtgtgctactgtcctggagtctaaaacttggcaatattcacaaagacaaaggacctggatcaacaacagactactcaaaagtggtcttaaaactcatataatcaataccagcggtattttttaccctgttaaatcattgtagacgtggaattatggaataaacttgtaatggaaggtgtagaaattacgattaaacatcttaagtgttaaattaatcggttgtaaaggctactctgtaactatctttgccgctgaatttgcgaacttgttctttagcttttttcttcttattccagtcatcagtaagttcatataacacctcactgaaatgaacgtgtttgtcacctaatcttgtgccattaagtgttaacagtgtccttgttgcgatatccggtgttgaaaacttcacgtatccataccctttgtgacgtcctatgccaaattcactaaataacaatttggtacctgtggtttcatctaaaactagtctcgttttactagttaaaggtccgtaaatatactgaaaaaagttatcgagggcgtctggagtgatttctacgtcaaggtttgtgacaaataacatcctggcatctcttagaactttactcttgtatagcttacacctttctcttgttaattcctggacataagtacctccatacctcttaattgagcttgttccatgcggcctcttaccatactgcgttttaaattggatatttaacggatttatatgacgattcctcggttcctaatgttattctcaatcccttaaattaatatttatcataataatcattcattatgaaaattaagataaaaaataccttgaaagaggtgttgattacgaaagtgctggaacttgtgattattacgcatcttagtagaattaatctcataatcacatgtatcataatgcatttttaaatttatttagaattattttcacatctttcatcttataaataataattttcaaccttccataacatgtgtagattccacacaataacataataatcattgtaatataattatgtgtgataatcatattgtaatataattatctatgataaccatgtgtaataatgagttctcaggaaataagtttaaaactgttgaatcgcacaaagtatgctcagaatcgtacaaaatattatactgtagggaacacagtccttgctcaaaccgaaaggcctttgtttatcactggtagtttcaatgactgtgttggtaatcttaaatcactctcacttaggaaatcttaccttaatcgacactcgtctaaacgtggccctttccagaaactcagctttcctcatgaatatttcaagtttctaggcgatcccgcctactactcacattctgaacttctatacgcttgttcttactcttctgagaacttcatgtgtgattcctacttctggaaacaaatctgtatccgctcatacacagttaccacttatcaatattatacttgatactatataatattataaatatttagacggtgtatatttattgtaggtgagaagctacgtgaggttagggacgtggttgatataaaggatttattaagttgtttgtgtagtgtagtgaaggtgaattattatgatcgggaccttcttcgtatgttatctagagagtttgtcgatgacattgataagctctcacttgctcaaattcatcaacttttacactgttactttaagcaaaacgtttactcttgtgacttgatagataaagttggacttaaaattactcaacacatcagcacagcccaaactagtgaacatagtgacaaggaaattaacactaatgtgagttttttggataaaattaaggatttaatacctggcaaggctgtggatgtggcacaaaagtgtgaatttgaccttaaaactttatctagaatttgtaaatacttgagctacttcaactacgctaattctaacttttactccgccatttctaacctttttattctttactgtaatcacatggacttcacatcaagacttcattttttcaactccatcaatcctaaactaattaatagtcctgaatcaactaatcttaatgatttattaaccaagtttctccaatcattcaacaatgactcaataatttatcatgagaatgtgtttgaccatgagaatgtgtatgaccatgagaatgtgtttgaacttggtacatttctatcatctgagctctttaaaaatgctgaaaactctaaactgcttcataatctttgctcaatcgcttctacaattaacctaatttccaactctatatcacatttacaccattttaatcagtctgaaattgtaaataaaattctaaattccagtgatactgccactggattagcaaaattgtttgacaaactttatcagtactgtgatgatattattgatgtaatgtataaaataacgcccctaaacacgaatggtaaatcgccttttattcaatcacttgagaatatttttatggactctattctcacctccgttaaagccctaaactcattttatcgcctccaagtcattcaattatcaatcatcaattctaataactcactattaaacactggaaactcaataatcaattctgaaaactcactgttaaacactgaaaactcactgttaaacactgaaaactcagtattaaaccctgaaaactcagtattaaaccctgaaaactcagtattaaaccctgaaaactcagtattaaactatgataacacattgcataactacgaacaatcgaaacgaatgatttgtagagtgttaaaattcactactgaggatgatacaattcacgcgtatttccttaaaaattgtagtaaaataaatgttaccagttctgacgttagctttatttccaaggtttctcagtgtctggaagacttcaattgtaaatctcaatccacgtcaaatttaacttcagcgttcgaattattctcactgttaccactgattaaaagtgaattacgtgaagcctgtggtaaaggcgttgaaattttatctcttgaaattattagacaactggtcgacttcaatcgtcaggacatttatagaatcaaactacttctcaactttaccaatacaaattcacttctaaatcactacatctcatactttcctaaaatcactcgaagacaacacctcaaacatcactaccaataattaatccacacaatatacaattgaatatataatgtacaatatacaatatatgatggaatatacaatagaatatataatgtagaatagaataattgtataatgtgtaggtgtaaaaagtgtattgagtagtctgaattgagttgagagtcttggaaattagactaagattggcggccaaaacgtcgctttcaggctgaaactaagctgttttctgatgggcgttgagtgcatttctgcacctgactttgcagtcgaatctggctcctcagaccttcccctctgcttcatcacacgttcgtacacagagaattccaagctaacacacttttcacattattaatcagtaatagtcgtgcgagttacattaccaattaataatttaaatttttaccaaattattggcaaattgataaaatttataaaatttataaaatttataaaattgataagattgttgaaaatgataaaattgatttggtgggatctggaacgtggataagctctattttgtggatgtggattagttgtattgactgagtttggcgacggcatgtgtgacagggaggttcaaaagtactacgcacagattgaacctcgatatctcaacggattccccgagcgccctttcggcgatagttgcacagagactttccccatagcctgttggttaaaccgcttgtacactacgaaacaacttctcgcccagatcccaacctaatccatcatcaatgtttatataattgtgagagtggtttatataattataattaatggtgagaatagtttatgagtgtgagtggtttatatgatgattgagagtattggtaataaaattggcattaaccaagggtgtgatggttaatgtcacccgtataccatttggtgtagaatgtattttgaccaagtaacatcgcgttaaatggcttcgattacattcatccacacttcacaaatttacatcaacataatttatataattaatgtgaataatgtaatttattaatcaatatcaacaatgtgaatagggaaaacatacggaaatgattaactgctcagagatgtggtcatcatgagatcagaggattgacagatgagaatcatcacggcaggtgcgacatcagagcttcttaaaggtcaaggtcatcataacgatgcagaatcttaaatcctcatcatcgtcgctaattattaaatcctcatcatcgttgctaattaccagttatatcaacaacccaactataataaaaattgttgataaaaccgtgttgatcacgggatgataaaaataattaataaatttaatctaaattaaaacagcccacctgacaacagatgggggtcaaatctactcgtaaaattcggattctatcgtatgatctgtgaattacgttgagtctataaaattaaattgttcaaattagaccataaaataataaaatacaaactcccacatacacaatacacaatacctactacttataaatatactacaccttctacactacttatacatactacatatatcataaaaaaatttacaatattaaattattatttattgttggtaaaaaaggccccgagcatctaccaagaaaactcagtaaatactcgaggccgcaaatgagtgttgtagatagttgagagagagaaggtgtatgagtgtaaactcctaacatcaaactgtaaactcgtgacaacaaaataatacatagttggtaaaaattgaccaactgtgtgagtgattttgtaaaatacaccagacccagtcagtaaataagagttgactgtgtcaatatttgcttccctttcgacctcactccgtaactgcacactcacaacaagttgttcgtgtgtctactcgtgacaacgtggaatgttgtacacatcgagcacctcgggtagaatctcagcggatcgtaagacaagcctactctcgcgcttacaatacccgggtgcgtcaaggtcgtctgcgatggatgtatcactttgggcgggagaaattgtgttgacggcagagccgtgggaactgcaggcatatagcgttgcgaaagcgccaaaagtgatggaaaacgttgatgttcagcatggattctgacttagaggcgttcagtcattatccaacggatggtagcttcgcggcactagcttttcaactagccgcattaaccaagtatccgaaccaactgttcctctcgtactaaattggattactgtcacaacgtcggtgcatcagtagggtaaaactaacctgtctcacgacggtctaaacccagctcacgttccctattagcgggtgaacaatccgacactttgagacttctgcatctcaatgataggaagagccgacatcgaaggatcaaaaagcaacgtcgctatgaacgcttggctgccacaagccagttatccctgtggtaacttttctgacacctctagctgtatatcttacagactcaaaggatcgataggccatgctttcacagtttgtatttgtactgaaaatcaaaatcaagcgaacttttccccttttggtcaacatgagatttctgtcctcattgagttcgccttgggacacctgtgttatcttttaacagatgtaccgccccagccaaactccccacctggctatgtcttccgcgttaatcagcagagccttgtgcaaaaacatggcgaagccaagtcttaatactacggaataagtaaaacaacatcaagagtagtggtatttcactgtcgccggagctcccacttatcctacacccctcaagtcgtttcacaaagccggactagagtgaagctcaacagggtcttctttccccgctgattttgccaagcccgttcccttggctgtggtttcgctagatgatagatagggacagtgggaatctcgttaatccattcatgcgcgtcactaattagatgacgaggcatttggctaccttaagagagtcatagttactcccgccgtttacccgcgcttggttgaatttcatcactttgacattcagagcactgggcagaaatcacattgcgtcaacaccttttcaagccatcgcaatgctatgttttaattaaacagtcggattccccttgtccgctccagttctgagttagccgttcactacagctgggaaggcgagccaaccctcggcaaataccagagcgcccatgcaagtccggaaaccctcacgggcaaccagccaaacaaaggcgctcaggaaacgccaagggccccatgctgcccggccctcagagccaatccttgtcccgaagttacggatccattttgccgacttcccttatctaccttattctatcgaccagaggctgctaaccttggagacctgatgcggatataggtacggacgggggtgcgaataacaatgttcccttcccttttcacggacagtcgtgggcgcaccagacaccccgaaagtcgagatgctattccagcacagagtccctatcgccagataagctgattccagggcactcgagactgttaaaaagcaaagataacgcttcccgggacccacgcctgcgtcgagaagttcacttgtgttgccacccagtatccacgacccggctcgggaatattagcccgattccctttcgcggagcggaccaaagtcacctcacacgcagttaagctggcgcttaggaccggctaacccatgtccaaacatagttcacatggaaccctgctccacttcagtcttcaaaattctcatttgaatattaactactaccgccaagatcggcactaggcgccgctccatgtgggctcacgcgccacacttcgccgcaacgcccacgtcttcctacacattgtcaccgagaatctgcgacaatggccgggtttcggtaacctgcttgagcgccatccattttcagggccagttcattcggcaggtgagttgttacacactccttagcggatttcgacttccatgaccaccgtcctgctgtctatatgaaccaacaccttttatggtatctgatgagcaggtatttaggcaccttaacccagcgttaggtgcatccctcatcgccattattgcttaccaaaaatggcccactaagaattcacattcaacccgaatgttcagttaagcaacagacggggtcttacccatttaaagtttgagaataggtcaacaggcacagcccaccgatacctctaatcattagctttacctggtaaaactgagacagtgctacgcaccatgaattccagctatcctgagagaaacttcggaagaaaccagctactagatggttcgattagtctttcgcccctatacccaggtttgacgaacgatttgcacgtcagtatcgcggcggacctccatcaggctttcgcctgacttcatcctacccaggcatagttcaccatctttcgggtcctaacaaccatgctcctgcgcaatccacccaaaggcgaccggccgcatgtgaattgagacgacaaagtcccaaggccatgctttcactttcatttcgcgtacgggtttgccacccaaacacttgcacgagtgttagactccttggctcgtgtttcaagacgagtcagttggaacatgtactccagacagcgaggctccagtcggagcatacccaaatgtaatagggtatttacatcggggagaggctgtagagtctggaatctgctagtcacactagagatggcacgactgtgtttagcgacaccccaatgcacgctggctgaaccaaagggattactcagaccatgccaggataattatccgggacaggactgtggcacccagtggaagcgtacgtcccaattggttccctttcagcagtttcaggtacttttaacactcttttcaaagttcttttcacctttccctcacggtacttgttcgctatcggtctcacacccgtatttagccttatgagaagactacctcacaatttgcgcttcaatcccaaaaagcacgactctatgcaggcgtaccgacacgtggatagacataggagcgagtacgggattgtcaccctctctgatgtcctgtcccaagaaacttagcaccaagctaccactggcaacgccgctcaagaccacaagtccgttggcaaattcaacggattttcactttgggctcctccctcttcgctcgccgttactaggggaatcatatttattttctcttcttccacttaattatatgtttaaattcagtggatagcctcacccaatctcaggaactccgttacggcacatcgtccacggcaacagataacagggttatgtaatgtcaactgactgagttagttattacacaacctagttatccattgctgttgacactgccaaatccatttgggactctatagtccactagccactgcattgtaaaacatagagtacttgcatacagcttagtttcactcatcaacaactagcgaccagagcctaaaatcgaaaacccccaacatgggttttcactcacatcccaactctaacagtggtaaccggtaactaagttatcagtcacatccattagttgggttgggataggaatttgaggttcactgaaatgggagtaccacgtgcaagcagaggtggtgtgtctaatacgttcagaaatctgttgattcgcagaagtctgcaagtcacaatgcttatcgcacttcgctgcgtccttcatcgttgtgtgagccaagacatccaccgctgaaagtttaaatcatagcattgggtaccagtgtttgtagactataataatccacattacattggtacacgtctttcacagatcatcaaggtaatatgtaaaacatagttaccaagatgataaagctccttaatctaccaagtatcttaaggaacatcccataaccacgtggacagtatgcaaaaggattaagatataaagtataataggttaataaattaacccaaaaccctaaacaatcctccacatactgatccgcattggcatgggcttacccgggtactcttcaaactactagtaactagtagaatgaggatccggcggggtagggtgtaacgccctcaaagtcaaccgaccaattgattgcctctatcgcttagccagctgaccctgagggatgacgataagcaaacccgaatggattttctaccgtcccgtcacatcttcccactaaaactagaacaccagtcttagcagaattaggtagtgaaactactagtgtagttcatgataggtagtaactactagtgagtcactcaatcaactctgttacaatgtggtccagaggacctagatggtaatgtgaatgatccttccgcaggttcacctacggaaaccttgttacgacttctccttcctttaagtgataaggttcacaaaacttccctagacgttccctgtcgggaacatcacggtccgaataattcaccggatcactcgatcggtaggagcgacgggcggtgtgtacaaagggcagggacgtaatctgcacaagctgatgacttgcgcatactaggcattcctcgttcacgattaacaattgcaataatcgatccccatcacgatgcgtactaaagattacccgggcctctcggccaaggataaactcgatgaacgcatcagtgtagcgcgcgtgcagcccaggacatctaagggcatcacagacctgttattgccttaaacttccttgcgatttataaccgcaaagtccctctaagaagcgatgacgggacagcgagagcttattcccgtaccctatttagcaggttaaggtctcgttcgttaacggaattaaccagacaaatcactccaccaactaagaacggccatgcaccaccacccaaagaatcaagaaagagctatcaatctgtcaatccttcctttgtctggacctggtgagtttccccgtgttgagtcaaattaagccgcaggctccacgcctggtggtgcccttccgtcaattcctttaagtttcagccttgcgaccatactccccccagaacccaaagactttgatttctctcaaggtgctgaaggagtcgtaaaaactgacgacctccaatctctagtcggcattgtttatggttaggactacgacggtatctgatcgtcttcgatcccctaactttcgttcttgattaatgaaaacatccttggcaaatgctttcgcagtagttcgtctttaacaaatctaagaatttcacctctgacagttaaatacgaatgcccccaactgttcctattaaccattactttggtacctaaaaccaacaaaatagaaccaaagtcctactttattattccatgctaaactattcaaggcaaaagcctgctttgagcactctaattttctcaaagtaaacatccagacaaagcgaactccgtccgaaataagccacatgcagagaccccgaagggacacagcgatgcagcagaaattcaactacgagctttttaactgcaacaattttaatatacgctattggagctggaattaccgcggctgctggcaccagacttgccctccaattgatactctggaagaggtttaaattcccatcattccaattacaagactttaagccccgtattgttatttcttgtcactacctccctgtgtcaggattgggtaatttgcgcgcctgctgccttccttagatgtggtagccgtttctcaggctccctctccggaatcgaaccctaattccccgttacccgtcgttgccccggtaggccaataccctaccgtccaaagctgataggtcagaaacttgaatgatacatcgcactaagtacgattcgcatatttattatgaatcaccggacaccgcaagcggtttggttttaggtctaataaacgccgccaaatggcctcgaacatgtattagccctacaattagcacggttatccatgtaaaaacgaacatcaaataaactataactgttgtaatgagccattcgcagtttcaccatataaaagcttatacttagacatgcatggcttaatctttaagacaagcatatgactactggcaggatcaaccaggttactattcaccatagatcaaccaacactatactagtatcagtctctctacagaacctacccctgtggttacaatactaacattattagtactcacttagtagattccagattagactactactttactagtgtagcctgtaactaccatataatgggttactaaagtgtacaacagatgaaaaccaacgtgagcatcagaagactacgaggatctagtgagtagcacatctgccataggtagctcagtggccaggtgagccaccagctgcaggtccctacccacgtaatccaaaagtattctcatgtcacgaccaagtacatcctcgcagctacaacctgaacatcaactcactacacaataatagtgtattgagccaatgaacaggtcttaacaatgagtttcacagccaaccacaatacacccagttactattagggagtatggttggtggtggagactaattgcttccgcaggattgtacactagactaggcaattcattagcaatgcttaccaatgtcacgccaacaagagacatcaaatgtcatctttactagtaattgattgttagttatgggacaaaatgtcaccctaacgacaatcactagtcacaatatccaccaatgtgatctactatagtagtgtcacacggtgttgattatactgttactaactaggtttgaagagctaacagaaccaggagctcagcagtagacctagagtatcacagtacatttaacgtctggaccagggaattgagggaggtccacataaaccattccaggattcagatcactcaacaataagaacatagtatttcattggcattgatattactacccttaacaaaatgtccaggcgaagtaataacaacctttgaaacagcaaacgtctgaaatttctagatttcagcatcaaacagtactcagtgccctaacataactcatttcttaggctgatatcactacccttaacaaaatgtccaggcgaagtaataacaactaatgaattagttcagacagggcctctcaaatattcactttgacaatttctcaggcatcttaactacccttaacaaaatgtccaggcgaagtaagataagactttgaaattgtcttagtgaaatttgatagagtctagactgaggtgctcacagacctcctctacatatatagttgaaaatgcaagttttaataactacgaaatctggggagtcaggccttttttgacacgataccaaaattaacaaaactcattagaatgataattatcaccactaatatttacataaatgttgaaagaaattgatttaaacttatttttcaaagtttgcgaaaggatgattaaaatttatgggccaaatttggaatcatggtggtccaaaatagaaaaacaccaaaatctgcttaaacagctgattttacaaaaaaataaaaagaaattcacaaaatagtaaataaaataaatgaaatgacgtatgtgggaacaactgtagattaaatttgaaataatgagtctcgcgagtgagtcacactataattgagataatcacacaataattgacagaatcacacaataattgacataatccacccattagttagataaattagtgtgtaaaaatatttaatcacatactaaaaaggtgtacaaatgaaattatgggattaagcttcgagagcgagtgtttgaaggctatttttgaattctgtgaatgtgggtgatcttaataaatctttaattaaatccgtacgcctcggactatatttacgctccaactccttcaacttattctgcgcactctctatcacctatttcatccatctaccaccgcacataccatatctaccatactaactacccttcagtattaaccatactattactatagtattaatactggataattatactgttaatagtggataattatagtaatagtggataataatagtaatagtggataataatagtaatagtggataataatagtgttaaagtagttgagagaatacgtcttgggggaacttggcgatgatggcgacgttgattccgaatgattttttgcatactccgtcctttaccttgtagagaaatgtcatgctgttgatggaatcataaaactgcgccgttaaatgcttattcaccactccaaaatgctctacattctcattccattccagacagatataacagtagtgaatagtagtgaataatagtgaatagtagtgaataatagtgaataatagtgaataatagtgaataatagtgaataatagtgaatagtaaaaattgggtacctaaagcgagagagcccatttcgtgaaagtgtgtagcacatagacaaaaacatttcgcacgctctatcaaatccaccactatcgcccatgataatccaaacccctacatacattatctatactatgcaatatctatactatgcaatatctatgtacaatatccatactatataacatcaatatgtaatatctatagtatataattaacagaataaatgtgttacatcgtgagtggatgtgcctcgtccgagttcatcgatgatgactagagagtgttcattggcgattcgtagtatggcggctgactcaaccatttcagccaaaaacgtggaaactcctctacaataatatgaacagtgagagttaccgttgttgtatatctgaggccccgattctgcataggatatgcttaaaaatcggcaatttcgccttcttacacggcacaaatgagcctatctgattcaatatcgctatcaggccgatctacacctttttataccgttgcgtaatgtaactactaaattatactgttgactaatgtaactactgaattatactgttgactaatgtaactactgaattatactgttgactaatgtaactactaaataactattaacacagtaacaataaccaaactgaataactcttaacacagtatactataactcaactaaatgactcaacaccgtaacgataactaagttgtaacttgtttgatgtatgttgatttccctcccatgtttggtccagtgatgatttgtactctggagcgatcccgttccatgtataaatcattgggaatgaatgagtttgaggagagtacgtattcgacgagtgggtgtctggcttcggtgaggttaacagttttccccgtctcatcgattgtgggcctaacatagttaaaaagcgtggcgacttcggcaaacgcagttaaaacgtcaagagtggcgataatcttaataaaccgctccaggagtgtccagtaagtgcatgcgactttaaaggtccttttaaccatgagatcctgggactcttcgtataactcaagtgtgttcttgtataaagtacattgtctccttagtttagcagttgtaaagagaaactcgttcttgttaagtctgactttttctatactgacgccggggatctgcgctttcattagagatgggtggtctttcttggctaccctaaacaaaaaccccaaggtgttacactccacaattttaacctggttcccctttttaccagatgagtatggtaactcattttgtatagcctggcgttgcatctctatgtcataccgtatctgatcaagctttgaagagattttcttcaaactctcgtcgaagttacggttaaacacgtagactctattttcagcctcttttaaatcaactgtcttctccactagtcttaggtaactctcaaatttactcgaaatcttactcagaggttctgcaaacaactcacggatcgtgtgagagtgtacgccgtcatatcttttaaaggtgaactgatttagcctattggccgatatgatacaatcgtagagaactacgaggtcctcgaaactcggctgcttagtacatttagtctcaactcccatgtcgaaatttttaaatttcgtcagaatctgatctaaattctgcaccttacggagacattcagactggatagttctgtacattgacttgaacgcctccacacagtcctgccgcttttttatatccaccacactcaccaacggctgcgttatccacatcttcagcaactgagaaccaatactcgttctacacttattcaacaaatcatacaaactcatcttcacacactctacacaatcaacattaatattcaaactatttataccctagggagtattatataactaagtaaatagtaaaataatggtaaatatggtaaataatggtaaatagtataactaagtaagttggttgattacgttgattattgtgtggtagtatggaaagagcgttgaaagcggcgcgatcgaggcagaggtaattatccatggtataaatagagagagtgaagtgtgacttgtaattccggtccttgtagttaatgaaatcagcagttaggcaaaacgccttcatcgcaagttttaagcttatctccttcatgtggttcttcaccgaatcgtcgtccatcaacaaatactccaacgagttcgtcaccttaaaatctaaacacctttacacattgttcacagagttacacattataatacacctttacacattgttcacggagttacacattataatacacctttacacattataatacagatttacacataatagagatttacacataatagagatttacacataatagagaattacacataatagagaattaaatggtataatagagaattaaatggtataaaagttaatagtgtaaataagtgggcaccgtcgagaagatcgatttctttgttgttgatgaatttgaaggtggttttgaggttacatacggcgatgacgtggttgattcgtttataatcgagtgaatctttgggaattgcgagaacgcagttggaaggattaatctgcacataaagttatgacacacgggactgacttgtaaaattaaagattccaaattagtaaaatattcgttatcggaaatttcagagactttaatggcattttccgagaagttaattagcgaaattccaacttgcttgaccagggaggatatcgtcttcacgacaacgcccaaaaccttaacattcaagtttaaagtgtttgttttcacgtgctttattaatgttatctcctcctcatcggaaggtaaatcattatacttgtcactactcgtaaacatttttactaatctcacacccacaataccaacttcaccataccacaaatattatacagtatagaatgttacatagtatagaatattacacagtataaatagtatataggatagaacattagatagtatagagtaataggttatttgtttggtttattgaaggagtttgggatattatggaatcccgtaaatcctctgaagttcctaaaaccagattatataccagatataccatagttagagagtgtagtagttagatgtgtaagcgggagtgaccccggaggggttaaatagtgaataacaacactaaataaccaggtaaattgtgtaaataactcataactaatacccctagagggagctatcttactatctaagggagagggagagggagctaaataactaagagttccgagggaaaagagagagccattggggtggctaactctgtagaaaataagtaataaataactaagatagggaaaagagagacccattggggtggctaactctgtagaaaataagtaataaataactaagataggggaaagagagagccattggggtggctaactctgtagaaactacataaataagcggtagcaagcaccgtaaagccgtacctaacagtagtggcgttaccgggtttggcttgagaatgatcccatcggaaagatttcataacgagtgcagacttcttcggtgactttgaaaacgaattttccagagcacgattcggagttccaaagggattcacaccaatcatattgggattgtgtgagtttacgtgtgagttaacactgagtgagtttacgtgtgagttggaggatggagtggagtctgatttgtagtgatcgatgttggagaagatggagtcgaatccttcgttgaacatgttgtcgatcaagtcacgtctgctcttgattttggtggcactctcaggctccaccatgctcctcggtaactccacgtgattcgtactcacacttatcctatcaactacacattcattaatattttatcaagttattttccaagggagttagttcacagaaagtatttagttcacaaaaaatatttagttcacagtaattatttagttaatagtgaaggagttagttcccagggagtatttagttcccaaagagggagttagttcacaaagagggagttagttcccaggggtaaaatgtatagttaagtaattagttcccaggggtaaaatgtatagttaagtaattagttcccaggggtaaaatgtatagttaagtaattagtttccaggggtaaaatgtatagttaagtagtttgtacaagctccgtaacggggtaactaactatacatctgagagcccctaggggctaaaaatagagtcccaggggctaaaaataaagttctagaggataaataacgagtcctagagagtaaaaagagaaataactaagaagatagagggtaaaaagagagataactaagaccctatgggataggtcataggtgctaaaaataaagttctaggggttaaaaaagagataactaagagttccgagggacaaaaagagtcccataggggtggttaactctgtagaaagataactggtgtaagagataaataactgtccggagggctaaagagagtcccattggggtggctaactctgtagaaaataagtaataaataactaagttccgagtgacaaaaagagacccattggggtggctaactccgtagaaaaataactagtatgagcggtagcaagcaccgtaacggaccacttggaatactaatattggcttgagttagtttgaaatcgatgaattgttcgaggtgttcgtcttttgtcaatttttgatgtttaagcttaagtaatttgtcgatatgttccctggtaactttgactctgtgtttcctgtggacctcagtgtcttcatcggaagattcaaaatcgctcaagtggaactcgtcggttttcttggcgtttttgagcttcatgaggagtttcagccgttcctcacggcgggttagttccttctctcccttctccttaaatgtcatcagtttggcaagttcagcttcctcctgtaatctcaagtcttcatagaacctttggcgtgcaatttcctcatcctcctcgttgatttcaacttcgcctatgaagtcctgcatctcgcgagcgatctcagtttcactctcaggctcactctcactctcggacgggttcattaaccgttccttcagtagctgaagtgaccgcttgatctcctcagggtctgataaattctcatcctcactctccaccgcctcaaactctatcatactcttcattatctcacgcatcctcattaggcgattgcgcctacttattttattcaccgcagatttattaacactttgcggaacatcttcactgtgttctactctgtccacatctacagtgtgttctactttgtgaactctgtcaactttgtcaacagtgtccatagtgtcaacagtgtccatagtgttaggagtgtccatagtgttaggagtgactgggggattaggagtgtattgttgtgtgtgatgtttgattttttgtattttaacgtaattttcggggattggttcggtgaattcttcgtcgagaatttttcttttggtgtgaattctcgattcctggtcgagtttggtaaagctttcaagttctctccggacctgagccttcacgttaaataactccggacactccggcaactgcttcgccttacttatcttgtcatacacatacttaaacaactccgtcaacttcatctgaccacccgacctcttgtccacattaccaacccgtatagtagtgtttaccgcgttaacagtgtttacagggttagtagtagttacaggtagtgtagtatttacagggttagtagtagttacagggttagtaatgtttacagggttagtagtgttggtggtggtatctcctgcgggagtatcctcagcaacagtagtatctgtagtattctgactattagactcaactttgtccacagtatccacagcagcaatattaccattgtccacagtatctacaggaggaggagtattggaaatgttagtggagttgagatgattggagggggaatccaaatcagtggtggagaaagcgagggtttcaaagtctatcagaggcgtttctgtctttacaaaacctaacttattaccctggcctaacatattacccaacttctcaacctcatcgctcttcacagagtccactagaacatctggattatcaatcttgctaccattgtcaactatgtcactagtgttaccattgtcaactatgtcactagtgttaccattgtcaactatgtgactagtgtcacagtgatctaatgtgtcactagtggagatagtgtttacagggttttgctcatgtgtattgtcgggtaattgtaaactcgtaactacaaaaccctcgtcctcgggaactgtagtatcctcactcttatcaacattgtctacagtattaacattgtctacagtgttaaaagtgttaaaagtggcgtttagggattgttgtattttctcgagatttgtggctaagttctccatggcggtgggattgacatttgtcggcgtaacgtccaaagtgtcaaaccgtatcaaactctccggcgaattagaattcaacggtgagtttacaggagaattctgtgccgagtttcctgacgaattcaatgccgaattacctgacgaattcaatggagaattctctggcgagtgatatttaaaaatccacggggaaaagttaatggcgtttgcgagtttggtccatttcctggtgtacttttcaagtttccagggctcggtgttgatactgtaggagtaaggttcattcactgtagctcttttaagttctatgataccataggaaactgcgtgttcctgtctaactccaccgttcagtttctgatgcactgaggcaaattgtaagagatattgatatgttaaatcattctgccgtacggagttactgggttttacgtagactaactttttacccctgttggccaggtcaaattccttcttattcggatttgaccacttggggcctttaccgtataatttacaagccgcctccagcactgataccgtagacaccgcgttcttatacacaaaactctgcttcttctttacgaacttgtccagtccccgctgcacaaagtgggatacaccagtgtctaccgtgttgtccatactattatctacagtgttgtccacactgttatctgcagtattgtccaccatattatccaatgtgttgtctattgaggtgtcaaatagtggtgtgtctcctagaggagtatggcctacgggggtatcaccggtagtatgtggtatgttattggtgtgatgaatgagtttgatgaaattgctgtcgaagctgtcgatgtgtttggttgtgaagagtgggtctttgcggacgggcgttgacatttccaaatcaccgatatgaagcgcagtaaatccaatcggattcctaccagacgccacagaactcgaatccggcaacgaactcatcgacatcacatccacaaaactattcgtatgatccaaactgtgactagggtccaaactgtgactgtggtctagactattggtgggatccaaactattggtgggatccaaactattcgtagggtctaaactattcgtagggtctagactgtgggtgggatctggaaaactttggttggtgtagaatggatttgaatttgggattgatatgttggaacttgactctgaaagcttcggcatagattccgacaaattcagcttagaatctgatgaattgtcaaattgaaatccctccacactctggtccaactgactcagttgtgtcatctgactagattgactaatttgacaagtagattgtgtagtgttgaggatgggatttggagttttgaagtagcgtagagtggcgtttttatcgaggacagttcggttaatgtttgtgtgttcgtcggtgagtcttttaaaagtcttgccaatctccaccaacttcaactcctcacacaacctcatcaaaaaccataactaaagaaatttacactcgtattaacttaataactttaaatatcttaccaagatgactatgtaaatgactatgtaaatgactatgtaatatgctgtagtaatcaagtaactagggacaccaggattataaccaagtaactagtgcaatagtaggattataactaagtataaatgacacagtaggattataactaagtaactagtgacagtaggattataaccaagtaactggaacaccagggggtagatagctaaggaagtagtggccccgcagggataactgagagccccggaggggccaaaaagagacccttaggacataactaagtataaataactgggtaaataagtaaataactgagtaaatgagtaaatgagtgagtaaaaataactgagtgggtacaagccccgtaacggaaaccttgagtctggcggatttgtatgcgattttctgtgagagtgcgaatcggttaagttcttcaaggagtggaaaagagaagatgttattcctgacatagtcaacgtatccctttaaacccttgtactgctgacacgcacactttatcaaattcgataatataaacttcccagtaaccggctctatcacacgactacacatctttacactgtggaccatagttacagtatttaaccacatagttacagtatttaaccacatagttacagcatttaactacataattagagctccgcaaggggccaaacaactcttaactagacaactttgtaactaaataactcagtaaatagactgtgtaactagacaactgtgtaactggggaactcttaactagacaactgagaactagggaattctgtaaatagactgtgtaactactggataactctgtagataagtacatgaaggcgggatcggtgagatgatcgagtgagattcgtttgcgttggggttcattgcgataggttaggttggtgtaaagagtgacagtgtcaaaggaggagagtagtgaccgtttcccgttgttggtaatttcgtgcacgaactcagtttcactgacaaggtcaagctcctccgactccaaggcaccaaacgaaaataaaacattattctcatttatgtacatcgagtgcatttccacaggtatcaaacaccgcaaattctccaacaaccatcgctccactcccctgacctacaacatacattaacaatataattatataattagtataattatattaatagtatgaatagtgttaatagtatgaatagtgggagagatacgggattggtttgtgttcgtttgggggtttttttgtgttgtgtgttttcggcatggtcagagggagattctggacgattctcctgtgggtcattagagttgaataagttcacattttccaattccatttagttgacagagttgacagagttgacagagttgatagaattgatagagttgacagaattttaccaattaaagcgtaatatacagtgccgttgcggtgtggttttacggcgtttaagagttattctggctatattcaggggtaaaaattagtgttgaaatgggtgagatttgaggatttgctggtatgtgtgtagtgtgagaggaaagagtaaataaaatccaaaggagttggaacatactactgagatgattaaaattttacgtaaaattcaatttactaataatttacacaaggaaataaaaaactgaaatgtgtagttgtgtggaatcttaataaaaaagtggtaaaaaaaagaaaataataaacacgcaggacacttggaaattaatttaaatcacattattaatactgaaattaaagtgtgtaactaattatcaaatgattaattgtcctttaggtagggctttccaggtccaaattggaattcacaaccatattcacttttttatattatcttcacttttttatattatcttcactatttatgttatcttagccaaattctagtttgtaatttatgtaatgattttatctttgaaatgtttgccatttggcgtccttttggaattttaattagccattccctcaatcggagatttgtaccccttaaatatctttattgtgttgcattagatttaccaatctaccaaaataagcaaatttttaattcatttcatctgtttacctcggaatctggtaaaaaaacaacaaatttcaagcctaactgtgcatcatcgaatttagaacctaacgataaatcaccgaatttagaccacattgatattaataacaaaaacggccgttatatcgcagtttttacttgtaatatatgcaattatcgcagtgctaaatctttctccaaagtatccacaaattctctatccaatcaccttacaattactatactattactatactattactatactattactatccaatcagtgtataattagtttataattagtacagccattggttatgtgaataatgtgtagcaagcgtatcatcatggtatagtgtatgtaaagtgtgaatcttgcaataaccgtatgttatctacacatctacacatctacacactatacaactgaatagtatacaactgaatagtatacaactgaatagtatacaactgaatagtatacaactgaatagtatacaactgaatagtataattctgtagtgcatttgatatctgatcagttgggatggtttggagagaagcagaatatagaggagatattacaaaggaagggtgaagatgtttcaaaaatggaactgggtaccgcaatttaactcatgaaagtttaggtgaaaatgtcagcgaatctgatctagaactcattaaacctcttcaacacaacaaatacttcaaacattaatttcttacactcttatactctactcactatactatacctattatactattatgtatatgctatgtatgtgtatagtactgagggtatggaggtataacaatgatataccagtttaatcataaaataaggccaaaataggccttaattgctcttaattgttcttaattaactcttaaatgtgtgttaaattgcttagattaagccttgtagatattactaggagttggttcactgggccgtggggatgagaattagctggccaagttgacttgtccaaattctgttgtgaagactctggaaattcctcatgaactaaccttatacaaaactaaccaacagggcgaaactgtaagatttagtctagaagagtacagagtccagttatacaaaaagaccggattgagatacacccctagtaaggatgttatctgcactgaacttggacatagtgatacagtagtctggaaccacacagatggacctcaacccttatctttcatctaccagtatagaaaattaaaaagaattaccgtttcttacagaaaaggaactctttcctatgaacttcaagacgatcaatggactctaacctcacccaataacaacactcaatctactacctaattatacctaccatacccctaatactatacccctaataccatacccctaatactatatacccccagagggagctatcttactgtatacccctagagggagctactttattatatacctaatactatatacactatattaatagtatagtaatagtatagtaaaaggtatagtactaaagtatatagtatatacactatggtaaaaggtatagtagtaaagtaaaaggtatgtatgagattagagaatttgttgttgaaagattggtaggtgttgtgtggcttgttcccatgtgatgtctttgagtaggttggataatagttgacctacttgatcgagtttgactctgacttgttgcatggagtcgcgttctcttaatgtgacggtatcatcgtttactgattgaaaatctaaggttacgcaaaatggtacaccaatttcatcagttctcgcatatcttttcccgattgaggcgccggttttatcaactttgtgtgaaattcccaggctcctcagctgtgactgtaccctggaaattagcggctcaaacacttccttagacgataatggaagaattgagcactttgtaggtgctattgacttgtgtaatgatacgtatttacgttcctcaggcacattggagtctacaggcctgaccctgtaggcatgttccagaatagagaaaattaatctcccaagaccaaacgatggctcaatcacacatggcacaaacgtctcatcacacaccttcacactcgtaaactcaaaacttaccatcgatcccctcaaacgaaattccctaccatccacaaccaccacacactctcccacatccacatcacacacatcatccatattatcaatattatcaatattatcaatattagaattgtgagtgttggaattctgtgtattctgatgacgggtgtgtagtagatgatgtaattctttggcttgttgtgtgttgagattgttgagatggttgagtatgattttctggtcggctttgaaggctttgccgatttcgggtttgttgcacttgacgacaactttctcgacttgtatgggagtgtcatagcggtgatgtgctacgagttgcgagtttgttgatttcgagtgacacatgagatcgtacgccattctgtcggcatgtccaaccacttcaacccagccgtaggatgtaagaatctcagcgtcccagcagtctgaagcgtaatgtgccatttcatttgctgtgtgttgtctaaatctgagcccagcttcattaattccaacacgtttcaaaaataaaaaagtacgcgctaaaaaatacgccaaagcttcatttcccaccatgccactgctcaccgcctcggacattgagaccagcacaggctcaaaattatcaactgactgctgatctctcgtcacaagtggcaggacaacgtggctgaattcggggaatttctcgtgagttttaaattttggatttacaaagtattcaatttcagccattgggaactcacgaactcttaaaagtccatttctgggactaatttcattcctgaatcctaagccgatttgcgctgccgcaaagggtattttacctccattaaactctagcagacgtgtaaaattaacaaaaatcccctgagccgtttccggcctcaagtaccccagcgaactcattttatcttcagttttaggaccaattgatgtcgaaaacattaaattgaacgggaacggcttggaaaagtcgttaccttccggtgacttcacctggttttccgtataaaatcgctccatctcctcttgactgtaggaacccacccgctcacgcagcctcagcaattccgacacactcaacctctccaaagcggaatttacaaccttaaccctagcattcggcgtcgtagtaactttagcattactattagtattacaactattgccagtttcaacactattagtagtaacactattagtagtggtaacactattggtaatgttgaggaagtgattggttttatagttgatgatgttggagatgagatcttgtaggtatttatcggctctgtagcagtctccgttggagagatttttgaccatgaggtcggtgaatctgtcaacgtgcccggaggatttaagtacgggatgtggcgtgatgcaggaacaagaaacttcgagcatttcgtcaaaaactatgaaatgttcacgccagagtcgctcaagttcagatttaagcgcacatcccggcgggccaaagtcaaataatccggcggagccgccgtaaatctcaaaggaattggcgtaaaaaaacctacgccttagtaaattctcacagtcaaccttgttcaaaagtaactgagccctcaacttctcagtcgccatctttctatttttagccaagtctgaactaaacgccactctcaaagattcttcaccaaaattaaacaaatcaactccaagattgtcaacactttttttaacactttcaacactttttttaacactttcaacactttttttaacactatcaacacttagttttggagtatcaacactgtgttccagagtgttacgacagtattctgtattgttaggagagagttctgtagtgttaggagagagttttggggtatttggattagtggttgagaggtttgagttttgtgactttgtgttgtaagaatatgtcaggggtttggtgagtaagaaggctgaggaatgtaaagccgttttagaatgagaaattgaaagtaatttactgagtctggagttaaaattcttttttttaagaatagaatcaaagtgcgataaagccaacgacttcttagatgaacctgaaaatagacaaaacatccataatgtaaacaaaatactcataaatatcaattaacaatataaacttcatttaattcagaaaatttattatttaccacaaatcatcctctccaacgcactatcaccctatcactcctctcaatttttcatccccttttaacaccgtatattattttaattatattttattgattattttaattatattttattgattatttaattatattttattgattattttaattatattttattgattatttaattatattttaatgattatttgatgattatttgatgattatttaattatattttaatgattatttgatgattatttgatgattatttgatgattatttgatgattatttgatgattatttgatgattatttgatgattatttgatgattatttgatgattatttgatgattatttgatgattatttgatgattatttgatgattatttgatgattatttattgatattttgggaataattgagtaaaaggtatgagggaagtgttggtggtttctgagagtgtagaattggcggaggaatattatttaagttttaataagttttccagcggatcaacttctcttctaggacaagttacaaaggcaagttttttctcttctctcgcctcttcaggcactaaatctctcaacactaaatcttttggtttaaaatctctcagtttaaaatctctcaacacgaaatcttccgggttaaaatctctcaatacaaaatcttccgggttaaaatctctcgggttaaaaaatgagtttgattatttgacgtttgagcaagttaagagttcggggttggaagatgaaaggtatgagttaattttagtagtttgtgacgatacggatgacttttatggcgaaaaaggtttggccaacttaactctgtttcacaactcgctcctgccaaatggtaaattcgttcttgccgtccctctcaattctccacatgtaattctcactagttaaatctaataaaatttgtaggaagaagaaatgaggaaggagttaatgtatagcggattagtggatgtagcatcctgtgcatactatcttaccaagtttatcacaggggttaggccgaactggaaagcgaaaggtgataggaaatcttccagcatccatgccgctcccattgacgggtacatatccaaggcgccagattacgaatcatgctccaccaaacccagagcatgcgctaattgtacctgcggcagagccgaacgcgaaaatttaaattccacagattctaacgctaattctacagattttaatgctaattctacagattttaatggtgtagatttgactactaattctaaagatgtgagtggagtagatttggtagtggatgttgatgcgccaacgtcgtcttgtggtaactgttaccttggtgacgcttttaggtgtgattcatgtccttacaaaggcctgccagcctttaaacctggcgaaaaggttttactcgaataattcaatgtactatacattatatactataatataccattcataatataccattcataatataccattcataatataccattcataatataatattcataatataatattcataatataatattcataatataatattcataatataatattcataatgtaatattcataatgtactattcataatgtactatagattatatactataatataccattcataatgtaatatatataataatatatatatgagtatgtgtatagtaggtacaatactatatcacattaaataccattactacactttttataagtatagtaatacgatatatgtgttatttacagtataattaaaccctaaattacaaattttgtatgtattggtaagaatgtactggccctaccaactcgcatgcaccccttcgccaacaaataatggtcagtttatatttaacatatagattgtgtgtattgttaacatgtatagagaacactctgttatacgtaaaattggacatattgatggcaaactcgcaattttaaaaaagaatgaagagactgatgcgttcgaaatagattataactgcgctgaattctctgaatttttgtatttctatgaattttgtggaaatttaacggatatgaacaagaaatcgattgacaatcaaacagcagaattcttgggattaaacggagatttgactaggttcatactagtcatcaaacaaacacatgaaggcgacgacatttcaaacacctcaacctcaaataactcaaataacactaacaactctagcaactctagtggtatgaattcccttgtacaaagtacctctacaccaataagcccctctagacaagaagagttattaaactttaaaacgtttgttgaaggttcgattgaaggttcgaaaattttaaaggacagtgatttgataatattcttgatcattggaggctgttgcttatctaagtacaaggagaggacattgttggatgcaagagaaatggaacaagacacttctattatgattttaacgtataacattgtaaataaaagagtgaatttatttactgataaacgacaactgatccgagtgtcattaattggttcacatctgacgttaaaaaaagaaattagccctgggtatttggtgaatatcttgccaacagatttggatactgatgaaaagaacaatacaaaatgtacttataaaattaaagaaaaagactgtaaagaggttcattcacaagagggtcaaatctatagaacagaggatggcaactttatagatcttgttcagttttacttaagaggtaaaaaagcgctttttcgagaatcaaataaatttatagtcatctctttaaccaacagttttcaaatgaaaacaattcctattccaaaaaacttaaaattttgtggcagaaatcatcatggagatgaagtaacaacactttgcgatccattagaatttactttaaacaggagaaataaccctgaaatcctgatgaaaaaagatttcaactgtgaaaaagttgaaatgaataatgattcagacgacgacacagccaaaaaaagattaatttggtcaaataatgaaaataatcccgcactgaggtccatggaagtattggaagataataaggcgatttttcatttcagaaaaaaggatccagactccgccaattttgacgagcatagtgatggcgagcatagtgattacgagcatagtgatgacggagacaccacacctatcgaatatagccaaatatttgaatttgccaggcaatataaactggttaatgagggaggtggtattaacttagactttactataaggaattatgaccccaaagtaccaatcgaagatgcgaattcttctgcttcaactaatttaactgatgagaattccaaaagcatagctgaaccttcctcggatttagacaatgctagcatttctacagatgatcagtaaaataatgttcgggattctcttagaaaccaagatggtgagcagactcaacaaaataaggattcagtggagtgttaatacattatcaactagtcacataaaataaagagagtggtacaggaaacgaatcattgggttgaaagtacgataaatttagaaattagttttgaaaatcacattacaaattcttaatgatttacaacttagtggagcccaatgtgtaaaatacacagttctatttggtttagaggtatggaatacaagttataattaatgtagaagtatgttagcacagttttgagtagtttatcactggaattattaacagggtttacctaccattccttaactatgtaaacaccaagcgtgtataccaagagaataagaatccatagcaatgttatggaatcttatgaaacttttcaaccagcttggtggtaatgaagcttaattaccagaaaggaatgattaaactaggaaatcacggtaagagttatgaagttagagttaaaagttgttgaaagattgagagttatgaagttaaagttaaagttaaagttgttgaaagattgagagttatgaagttagagttaaagttaaagttgttgaaagattgagagttatgaagttagagttaaagttaaagttgttgaaagattgagagttatgaagttagagttaaagttaaagttgttgaaagattgagagttatgaagttaaagttaaagttaaagttgttgaaagattgagagttatgaagttagagttaaaagttgttgagttgatagccctattaattataaaagatttattgaagaaatgtacaataataaatgttacgttagaggttctatggatcatatgatgtcgttgattaagtttatgtatgtttgtgtgatgtaaaatttaaaacaatttttgtattttgtgttttgtgttttataaagttttttgttttgacttgatctcgtaatgattacagttggatctacctaatccatatgagtaaccacagtatcttgtttattgtttaaagatctaatgccccaaacaattaagatcctgatctaccagctcaattaatattaattattactgaattggatgaaatgtctacaacggaaggtactaatgctttcatgagcttatatccagaaaattggaacctggtaaatttgaacctgaaagtaataaagaagcaaaaaaggtttgaatattttatcaggaacaagtaccgggagtatatatcaaactacggatatatatttgacaaagtattcgggaataataatgttatttgggtgggtcgtagttttaatgagttaagcagacttgtattgatgtatgaagatgttgagaaatacgtcttgataataccaaacgacgataacatgatactattccaccaactaaacgacaacacttggaagcgtattaatactcaaataaacttggcgaagctgaaaatttgtaaacaatttggttatgatttgctatgggattttaaagttaaattagaagattgtgaaagtcccaaaacacttgaagatttgtctatatttgagtcgtattactatgatctggataagcataatcttaaaatcattttcaatgcgttttgccatagtatttcctattccgggaaggaaatctggaaacacacaaaagacgatgctcatcacggacaacttaactcgctaaaatttgacctgatttcaggtgatgtaactatcacattcatggatgaaactactgaacctcttgatctgaatggatcaagcaacaaaaggcctagagatgaagctgaatccatttacccagctaatgtaagccaatccatttacccagctaatgtaagccaatccattaaatcagttaatctgaagtctgagtcaaataatgaaaaagttgtgaaatctgagtcaatgttacgggatttgaatatgcctagtattgaagtacctagagatccagctgaatcattgagctcacttggtgtgagttcagatgctggagtagaacaaagagtaaacgagtcaatgtcagttgatttaatatttttagatcgtgatacgaagttgtcagcgaccaagtatagaacagattgtgaccctgacattcagtattttataactaataacggttttctctatggtagaataacagatgatggtaaagtaattgttgacaaagatgattccagacatttttacagaatatataagtctggtttggaaattgacagggcaattaagaaatatgtagattatctcaagtttgtgaagcctaacattgatagtttaaaattttacacaagaaacaataaagaactcatacttgaggattacaagtttaaatttagtgtgtttcgttatcagtatgactttttcagggcattacacaaaattatatacaatggcaaggtctatagaaaatatgattatttcaaacacgaagggttcccagcaagtctatactttacacatgtcgattttaatattacactaaagttctattacgaatttccaaaagatacaaaaatcggctttaacgtgctgaaaatgtataaagtaaatgaatgtggtaataagtatggatgtggtaataagtatggatgtggtaataagtatggatgtggtaataagtgtggaagtggaaaaagggtagagctggatgatgaggattacgaagatattaaaacatttgttggcacaagattatacacgctaagagatgatagtaaatgtaccgaagtttcatatgacgaattggttgtctggagatatgagcctggcaaagaatatcccaaatctatatgttgtgactacaaaataggaagaatagacattagattcagttcacatgtagcttcatttgttagattcggatatcaaagatgtttcacctggttgacttttttccctactgatttgaaactttatcaagagaatgaaaatggcaatagtatggaattgaatcaaaatgactatagaattaacgtcttaagtccttcatcaattgagtacattattaaggcttatatgtgtaacgagatcaggtttggcgattctactctttggaaacgcgaaaacggacaaccattccccagaaaaataatttatcaccttgaagttcccagtattgtaatctacagcaaacaaagccgatctgggtactttagagaaacaaaactatttgagtttaaaagaaacaaggggatatggacacttgggtatacttacaaataaagcatcactaattaacaattttatcctaatatattatctgatacatatatttatagcattttgggtacacatttatacttattatctaagaacctgaggctatagtacctagactactgtactcttaaccactattatttggctaatttggaattataatttgcttgtgactaacataaacttctactgttggaattttaagatttagttcacaaccaacactataatatatattaactataaactatgtgtatttaagatgtccagaaagtgtcccatagaccacaaggtaactataatgaacataactttgtagttttaaagaagaataaagggattgggtatgatattgatctgaataatcacgtaagatctgcctgatctataagaaccgtcggatctgatttagtttagagatctattaccccaaacattgaatgtccagttcaattaattagattaatattatcatagaataatataaaatgattaaaataaaagatactaatactttcatgggtttacctgcagatgattgtgagttagtcaccttgaatctggacataaaagccgagtcaagaaagtttgaatatattagtaggaataactacagagagtataactcaaactatggatatctatttactaaagtattagagagtaatacggtagtttggaaggccagatgtactactgaattcgcaacaacagttttggtgtgtgaaggtgatgataaatgcatcttggtcataccatacgataataacatgatactattcagccaactaaaagacaacacttggaatcgtattaatactgaaataaacatgaacaagctaaggatgatcgaacgacttaattatatgtgtcgatggaaatcatacggcaaatatggagaattgagcgattttccaagacttagagatttgtatagattttctgaatataattacgatttggataaacataattttaaaattgtttttaataatctttgtgaccgtgtgatttacgggaacaatttggtttggatctataaagatgatccgtttcaaccatatccagactatttaaattttaatcttgtggataaaactgtgaatgcagtgttaaaaaatggaacagttgaagtactgtaccttaatctattaagccacaaacgacctagatataatcaatccgttgattcagttcatccgatctcaaatactgaagaaaaaagagtaaagaaaaggcgaacttcacagaaattgaaaaagtcaactatcaaacaacctggatccaatcaatccgttgattcagttcatccgatctcaaatactgaagaaaaaagagtaaagaaggagccaatttcagttgatttaatatttttagatgcagatatgataatgtcaacaaacgagtataaaacattttgtggtcccgatttttactatttcaaggctaacagtggaattttgtttgggaaaataatagatgatggtaaagtgatttttgatactgaggatcccacaaagtatgttgcagaatacaaatctcgtctaaaaattgatagaaaaattaacaaaaaaatagaatttttcaagtttcttaaacctaatattgataaattcaagttctacaccagtaaagatatattactcaaacatgaggattaccgtgtggaacacgccaaagattattataagattaactttcataaagatttgaacaaaattacatacaatgacaaaatatattgggaatatgattattacaaacacgagtatctgcctaccagtgtttactttacaaattctgataataatatgacattagtgttttccaatggagttgagagggatattaaaattagttgcaacttattgaaaatgtacaaacttcaaaatagtaactctgaaaatagtaagatggagatggaagaaggagattgcgaggtcattaaaccagaatataacaaaagattatacacgctaagagatgatattaaatgtactaaagtttcatatgacgaaatggttgtttgggaacataagcctggcaaagaatatcctaaatccataagctgtgaatataatttggccagaatagacattagattcaattcatatataggttcatttgcgatattagagggctgtaactcgtttactcagtttctttgtttccctactgatttgaaactttatcaagagaatgaaaatggcaatagtatggaattgaatcaaaatgactatagaattaacgtcttaagtccttcatcaattgagtacattattaaacctattaagtgtaacgagatcaggtttggcgattctactctttggaaacgcgaaaacggacaaccattccccagaaaaataattagaaattttgaagttcccagtattctcgtgtatgatgaatgtaattcacatgacaatcttccaaaactaattgaaattaaaataaaaaaagaattttgcaaacttgagcaagatacttaagtatcacttaatcaacaactttatcctaatatattatctgatacatagagtagttttaagtagttatattacatagcatcttaaatcatgagaacatagtatctagactactgtactcttaaccactatcatttggctaatttgagcaggatactcacatcctatcggaactatctagacgctaataccatagctatacccttaactatatacctataatacctagaatgactataccttaaccacatgtataggcttaactatatgtatgtttaaccacatgtataaacttaactatacgtaagtttaaatataggtataggtttaaatataggtataggtttaaatatacgtataggtttaaatataggtataggcttaaatgtaggtataggtttaaataaaagtatgggtggtaatgtgggattaaattattcttgaatattttcatattgtggccatatgaatgcttggagttcgtttgcgtatttgtagtagatggtgtgtgaggtgttatatagcctgcaattatcgaacattctcttgagttcttcgccgaattgttcctttgtcttgtattctcccagttttgcctttcttttcattgttgagatgtcagtgggatgagtaataatttcatagtagtctggtgcctcagattgctttacaggtttcctaaagggccaaacactttgttgtttatttaaagtgtttaacaattctaatatcgaggccttgagtgattttttctgtccctcaggctcggcactggtggccaaagtgttgaggttactggtctgagttggtgtccagccagcctctagtagcccaggtatatcacagggatttatggtgacagtggtgtttttattaaacacatttaaaccgctgtagactttgagaggtttaatggcttctatacacttgactacaattgccttctgctgacttagcatatcactaagtctgagatagttaatatttggtgatatgtaacattccatgagagtgcctccgtcataatctttaatgtatccaaaccagcgttcccggggcattgtgatcttgagtgagaagccctgtttcttaaagtagccaatggcaaaattatcagcgtaggttaaaaagtattcaatattactttttttaacatgttccttgaggtggttcataatcctggtcccgtagcctttaatttgttcagtggatttcacggctaaaaatgcgatttctgcaaacctctgctcaaaatatggtctgaaacagatacctccaatcacctcgcccttcttaagtaaacagaacgtataatgattccgatcaaacacaagtctcacaatgtattctcggggcattttaggcaactgtcgggagaaaatattcttcaccgtgatcagcttaatcatgtgtcctggttctctgtcgttagtaatacattcaaaggtgattatacccaaatcttcttctttagcgcctccggcgtctctatgtagaaatcctaggcccgtctctgatggtaacagtgactggatctggtaccccttagcactactcattgtgccaattgtatttgcaagttcatcactaaatccacactgcttacagagtagtgagatgaacagatctggatgatatttgaatgctgtcttctctagttcaagtcttatgcgatctgcgttcaggactagaacggctctgagaaaatcagctgaaaagtagtcacacagtttaacaccagtcggcatatgttttctgagataattcttccaacttgtgtatatcttttcgtagtcttttcctgcaaatgcttcaccatcttgtgatttcagccaagcttgcagatgctcatttgcaaatttttgtcttgcagttggtgtcaaaagctgctgataacttattattgcacacagtgtgttaactaaagattccaaatcttcattgttagatgtgctcaagatgcttctgatctcgagcagatctttccttctgggctctggaacagtttcaaatgagcgtctgaaaatatttgagacgtcgcggccacctaaaactaagtgtgaaaatgagtctgaatttttagatgagtttttgggctctaaagtcggctgaaatggatcaggcctttttttacagtccagaacgtataaatttacgatttcccggacatatgaagttattgactcatttttagaatttaattccgtgtttacagaggccagtggacgtgatatcgttttggcctctgttgctgattttggcgtcgaaggccccggcgaagatgtggactcattactggccaaattctgctggcttagcttagttttcatacagttaaaatttaaacttataaaacactttttaaagtgccgacactatccaactcatttacttattcggacatcaacaccaccactcccacctctccacagcctacaattttttacatcaacttacaatcatcatttattatattatttatattatttatattatttatatgaaattatacattaaaatttgtttattaaaaatataactcccgttggtatttttgctttaaattcccaatttctaatcccaaatttttactcaaaatttgtaaaattcgaactccaaatttttactcaaaatttgtaaaattcgaatcccaaatcttcagttaaaattcgtaaattttaatcccaaattcttggtggaaatgtgtaattctaatcccaaatgactggtgtaaatgtgtaaaattggtggaagtgattattggaatcgtttgagtgttttatagatttggtgtaggttgatgggtttgatgggtgtgagttgggattcgtcttcgatgagttcattttcgatggatttattgagtagttctcttgtgtttttatcttcccagttgtgtgacttgacaggttttcctccaaaaaattgatattgctcgtttgatctccaaattaaattcttcaactgagcccgcaccttctccggacacgtctgctccaccatcatcaaaaacggcttaaaatcattcacaacacaatcctctacacattttttcatcaacatacttatttaactcctaattatatactaactcctaacagtattatatactaactcataactatagtattatatactaactcctaactatagtattatatactaactcctaacagtattatatactaagttataatatgtgttaactagtgataatatatgtgtgatacgttgtggagagtgtgatgtgagatcatcgatgaacatccattggtatacgaggaattcgttgagtctgaggctgcaggcgatatcgacgattttaaccgcttcaattaaaagcgcgtttttattatgcgccggacactccaaattctctatcctctcacccattctcccacttctctcactcaatttactacttctctcactcaatttactactacgttcactcattcttccacttctgtcacccattttactacttgtgtcacccattttactacttctttcacttaatttactacttgtgtcgcccattctattacttattttactactacgttcactcaatttactacttctgccacttagtttactacttctctcactcaatttactacttctctcactcaatttaccacttctctcacttagtttattgcttattttactacctcctattctaccacttgttctgctactattcccattactaattctattactaattctattaggttcacttgttacatcagtttgatcattgagtaagtttgtttgatgattgagaatgtttgtttgatgattgagtaagtttgtttgatcagtaacgagatgatcaatgtctagatcactgttgatatcgctgatggggatgtcgtcgctgtctgcgtcaccatagctatacaactgttcggtggtgtttctgaatattttaatgagttctgataacaggacgggccacagcactgtgagattatcctgggaagtcttcgcgagtaaaactctcatgacgaataagcacttggccctgagggtgtcattcttgaaagtcctcgtggtctctgctagtctctcgataatattagaaatattcgaggaaaaggtgtcgtgttccgaggcgtagagtacgaatgccagacgtttgaggtatttgaacctgctaatgaggctggaggatttattggagaaaacattcatgtgtggtgggttagtgtagaaatccaacttggtcatcatgtcagtggagcctttacaatcctcttccaccacttgtctaaatatctccaccagcacattaagacagttacgatcaattctgaagaactcctgcgagttaatatattccagcatgctcttcttaatagtactcaggggcacttcatagagactgtagggtaaataccttagtagtacaagggtaaaataccgctgctgtaacgtctgacgttccagcattagtggtaaaatgtgtgatcccaggctcttgtgcagggactggaacacgatgttggtgattggagttcttctgttcaggtgcaaaatctcataactgaagaatattaaaaatgccagagcattttcacacacaacctcagtgttatctgggagcgcaggaggtgacggcgggtcagtttccgacacacttggcgctctactcgtcaataaactactcgtctcattacaaaccaaactctttatatccatcacatatcttcccatatcttccgtattctccacgtctaccgctttgtccactgtgtctactggtttgtccacattttctacagtgttatccacattgtgtactggaggattagtttgtacattgtctacagtgtgaatagtgttgctactgctggtttcgactagattctcaacactgctgtcgacaatgtgaccattctcgacaatgtgtacaccgtcgacaatatgtacactatcgccaatgtgaccgctgtcgacaatatgtacactttctacagtggtattattggactgtagagtaatatcggagtttaacggattcacagtatttagatgtgctctgtgtacccttgacggcggtgaggtggaattaaaactaacaacagagtgtaaaattctatttgaaaagtaataattcgagttaatgagttggacttgaagtggcacgggtaaaagcgtgtcatagcttgtctgaggtagccagtgacatatcttctgagcgtataacccacacgcttgataaatcactaccataatcaggtcattgaaaagccgtttacagttatttaccagcaccttagaatagttgtacacggtgattttctcatactttagcagggtttgaaatagccataggaacactgtgggctgtttcgggtaatgtaacactaatcctacccagcgttgtaactctgcaaatgtcgagtctacgtcagcctgtggtatcattttcgaggtggttatagcgtagataaattccgataatgaactttctctgacgtttgtgtttaaaattaagtacccggaggcatttttaaactctgaggacctgcaaaacgactccagcatgtccagcgtgtacgataacagtaatcgggaattaagctgtggtatatgacttaggaccaggagaatacaatttttagtctcatttcggttatagtggtctgtgactaaaattgacgtacagagatcactgaggttaaagtccggaatcactaagttcgactcgtcccaaagctgtatacacgcctttataaagtgatacggcaactttaaatataataacttaaataatctaatcacctgatttgtcacattctccaatgatacccgctgcgccaaattcaactcgtcactcattcctccatactctctattcacctcaccattcacctcattcattttctcactattcaatttctcagtatttaacattttctcactattcaatttctcagtatttaacattttctcactatttggaaacttctcactatttattattttctcagtatttagggtgtttatcttgttggcggtgtcagctctgggtgaatccatgttggaggtgtcaactggtttgttagaatccgctttgtgtgagttaggtttgggtgaatcatgtttgggtgaattaggtttgggtgaatcatgtttgatggaatcaactttgatgaaattgtgattgtttgcccagatgagtgtttgtatgcaagactgcaccagatgagtaacatcgaggtgtggaaacccagcggagtctgtaagattcttcttcttttgtttattcatagaaaagtatggttttccagattcgtctgtgattcccaggtttttccctgtagacttcgattccctggcactatacgaagcaccagttttataattctccgtcacatggttaaacatgaaatataacgccctgatatagtaaaacatgccagtagttcctatgcaatttttataagtggtcaactgggtacaaagttcaagtataaagtgtgacgcatattttacagtctcaggtccagacaaatacttgaggttataaatggcaaaatcaatgtaagattgtagcaggtggatacaccttgccttggcagcgttaccgatacaaatgtgaagcaccttttcaaagtaatcaatttcagagagtttagttaatcttttcagctgtgtcttcctgacgttggccacgttaatgatgtagattggagacaaataagtgtgcgaagtttcaaaatccttgatgaaattcggtaacacttccactccctgaagtaaattccggttatattcattctcaaacaaggggtcgctcgatacatatctattcagttgctcctcgtccatcctactcacgtcaatcattccattaccccaattcccaacactattattgtacacgttaacagtgaaactcccaccgtgtaaactattggtaaaattcccactgtgtaaactattagtgaaattaccactgtgtaaactatttgtgagattggtgttgtattggtagtgatcaggattattggtgaaatcaacgctagactgtgatttaggcgtttgtatatcaagattctggttagttggagttttgagaagcggtaatttggataatgactttgccagcgcaatgaggtgactgacgggtttactcattgtagtagtctcctgatgacacctgtccattactacttttaacaaatatatcatctgtgtctggattatatgttgatccttcaggtgaaagtggtataaaatcagtagtaaatactttgatattagacatgagacctcaattgataaattcgtcggctgcagacatgataaaaataacttcataaaatctatcgctgtacatctcagcaacatcgcagaatcatccattgatacatcaaaactaagagcatttgagtttccacatacgccactagtaccattaacaatattattggtaatattattggtaatattattggtaatattattggtaatattattggtaatattattggtaatactattggtagtgttacgtgtgataatttgttggtagaagaggagatcatcggtggtggaggttagaatgagtgagctgagatcaacattgagacaaatgtactttagtgttatcactactaccaggtccaaataattataaatcgactcgtcagaataacaagtatacgacgggtcaaataatctcggaaatacagagtactcaatctgtgaatcagataatacaggactggataccgtattagccactgtgttatgtactgtgttaccatgtgatttaggtgttgtttctggtacagaactaggcactgtatcagatgtaccattagccaccatactactggaaactgtatcactgggatgtgtatcacttactacattatttgggggttctgtttgtgtgtttgtgagaatggagcttgagggagtgtagaaaacttcattgccaacgtggtgtacattggtttgtgatttcccttgtggtatggttgatcttttcttccccttgttaattttaatcttactaaagttgtgagctgtgtggattttattgattggtgtgtgaaacgagtctgcggttccattagtttgtaactttttaggtgagtttagactaattaaatcatcaagcagtgtagtatttttaggttgcaatgagctgggatctgtgcgaacagagtctctacgagcacttgattctcccaacacttggctattaattgtaaactgtttagcctttaaagtgtcttttaaaaaatgttttataaaacttcctccataatttgacacagagtcctccatactcaaactcttttccataataaaactcttttccataataaaactcttgtccagattcatattcttgtcgataatttgactcttgttggttcctaattctgatttagggtgtggactttgaggaacagtttcaagtgtttccgacaacgtattaaacaaatcctcgccctgtacacactttagtaaatctattggcacctgacgtttctgcattatatctaatatagcctgaccctctctaccgattatcgatgataaatgtctaaaccgcctcacaacctcagtcatcacattcctcgtctcagtatcaaatgtctgactagatatcctataaaatctactaccacacaccgtaccagtattattcaacttaatgctattgccggactgagtattcggagatctaatatccttagacttgaaatccttcaaattattatctctagacttgaagtctttagagttaaaattgttggaattattatctctagacttgaaatccttcaagttattatctctagaattgttatctttggagttaaaattgttggagttaaaattgttggaaatatctttgggttgtgtatgggtggtgatggagtgtgtgggattgaatttgatgagaaacaggagaatgggatcgaggagatttggtagcatgtaaatagactcggataaaaaagctctagcgtagtaatgcagtttaggattagactcttctacggcatccagtatgaacccaatagcttcagaaaagaacaactgatcaggtgcatggatgtgtaaatacttgatcaagactccgaatcgtaaaatcgcaccgatttttaaatcaacatctctgcttgtgagatctttaaccataagatcttcagcctcctcggaggtctctggtactgagtacattaactgtagcagtaacaacacgatttcagaatgaaatgaggagaatctgtcaactaaactgttccaaagttgcatgattatgttccggagatggaagatcgagactgagaaaaagcgcttcagatgagctttcctgggtaaattaatcacctgaataaatgtccgaatgcctctgcaaaatatcatcgggtctgacgataatgaacatttcaacaaacacattatccaaccatccaatctaaacccctcagaactaatgtctgatggactcttactcccactactactacttacattatttttgtcagtaccacttagattactctttatactaccggttagattattttggtcaccactggtgagtttactttttacggtagaaaccttagatttattgttggtttttttctttttgagataattgttgtcgatatatttgttgactagtgaatttgcgttttcggtgagtgtcaaatcgctgaagtggttcgtcatggcgtcgtcgcaggcaaactcgaaattctcggagaatgacttgatgatgggcagagtcttcatgttatgttcaattgacacgaatctcacggctaaattatttaacaaatccagcactgaaacttcggaggttgttaggatatttttattgtcaaagtgtgtgagtgaattaatatagaaatgatttaaatacttgaagatccggtcattgcagagtttctgcacctcgatcagatgattcatttccttagtctcctgagcataattcaaatccgtatcaaaacagtattcgccattaataaaactttctatacggcccagaatcgctgagatgtacctgagaatgtgggaaatcaccaacacctgcgactttatgtccagtttaagtaatttatacagcgcattctccaggagcatgaagagaccgcccaaaaccgtctcaaacattgtcaaagtcttcatctcatcgagataaatattactcaaatccaaaatgtcattccactcctgtatggaattatacgaattatccaggaataatttattgaattgttcaattatcgagttgaaaactacgtaaggcgatgtcagagtggtattaaagatgattttactttcttggataattgcggaatgccagtctgggtcatcaattttatcacaaatgtatttcaggatgggaatacacagcactggcatcagctggtcagcgataactgagacctcaatatctgagattaaagttacaacaattttcaagggcataattacttcctctagtgtgttaactttcatcttcaacaggtcttttactgcggtaattatcacactcttggaatggttgttgaaatacgttaaatcaatagtttccacagactcgttcaggtcattagtgttaaataaccactggtaaatacgtctggtgagtgaccaatctctttttctcagtaatcttaaaaaattcctgcaaagtgccgccttactgtgatacttgaaaatctccgaatctagtagaaaatatttcgacataaagttcatcaattctctcaaagttatcatcgaatcatcttgcgatgctgcgattaaactgtttaacaccaactcattcctatcaggaagtaatgaatccaacctctcctcactcaattgagtcacactgggtaaaagcactggtgccaatttatttgaaattacgtataaagttggtaatcttatctttgacgctcttttaaatattagccatagggatctcataaaataacgttctggtacacaggtgctgatcttttcaaccatctcatacaccatcccgtaggtgtcagatttatcatcttctagccctggtaatatacaaattaataaaccaataagacatggtaataatttaggccctagaggtaagaaatatttatcaatgatttccaggaattgtggcctgactgtgtgagagctgtaggaaaagaaggggaagagcccggtactaaagagtgccaaatcattggataaactctctgtggtagttttggctagaattgagccgtaaacttccaatgctctgatgtggacaccagttggtaactgatgatttaaacattgagctaagcgtttacagatgatttccttgtatggaatgtgtggtattgtggagtttgttaaaatacgatttaacttgattaaacagttggtcaagtcggcccattctctggtcttttcaaattgcgcaagaatgttacaggtatcagtatcaagcttctttaactcagctctgttcactgatacgtgggcggatccgggagtgttatcacccatagttccaacactaattaaaaatcatgttataaattccaaaacatatgaatgacatgctttgggtaatttttcctagcgttgaaaattctctaaaaatcagttcatcgtaatactaacccattcctctaaattaatcaaattcataaagtaaattcaacacattcgtaaatttacttaaataatccaagaaaaagtgcgaagtttatgaaattataaaattttcagggacagaaaacggacttgccagaatgattccacgtccatttaaaatcaataatcaggaaattttaataaaacaaataataaatccaatgcattcaaattttaaaaaactacaaaatacacatttaaaatattattctacacattttatctagaatttaaaaaaatatcaggttgctgcaaaatcaaatttaattattttaaacttttcagcctggatttacagtaaaaaccctaaaatttatttccacttgattacttgtgttttcggtttcttttgagagctttgatggttcctggaatgatttgtgaggaaatgttttcaatcaacttcacctccatatctggattcaacttcactctagactcaaactttgctcttctaatttctccttgtattttttcctcatctaaatttgacctcggtgcttcagttaccgaaaggcttcctatatccggatactcatccaaaacaccgtctcccgtctcaatttcaatcttattttcacaattgtaaagtgttattgagtgtcgatcactttcaaatcccagactcagcgagtttccatcattttcaatttccatactcgggatcgatacttcactcattatttccctcctatcctcattctcactgctgttgtaatttgccatctttgaactgtaatattccaaatcagaatattccccaacttcagactcgttatcctgagcgtttttagagtgttgtgaggtgttgttttgggtgttgttttgagtgttgttttgactgttgttcgggtccctgatgggactgttcagagtgttagagtatctggagtcactgtttttaccactgttaagcccagtttgaccaccaacgtcatcattgtgttccaaattgagagttgagcttagagagctttcaataccaattgacgaagagtcattgaaagaacttgacccaagtttatattcaaggccgtcaacttcctgaaatttctcctcttttgacacgtttaggactggaattctccgttccctgacaactgggagtggaatttcaataatcctttccttctgaacgactttcggcacatcgacaaacttttcaacgtactgaatttcaggcacttcaatagtcttttcctcctcaaatatcttcgggaccttcttgatcttctcaacggttactggcctcttaacctctttaatcttgtattttacgatgggttttactacctctacgtatttgtcaactacctggacctgtggaacgtatactattttctcatcaatttcctccaccagcacctccacgatcttctccctcgttatcggcttcagtatgatagctctttgcatatcccgtatcacattgccgttaataaagtttagctcatttacgttgacaaagttcataagggggattccagtcacattgtactcgctaataaatacattctggttcaacttatccttacaacaattactaccacaaaacaccatcctcaaatttttactcaatttctaatgacaatagtacaatgttataacaatgttagaatagaaaatttgatctgaaaataatttggagaaaatgattagtgagccaaatttaaatgcataaagtgatagtgaatacatgaggtgtgttaaattttaggctcgtttactgagccagggctcagatggaaccgtaaaataaatttgttatttcattttaaacagagcaataccaaaactctgtacaatattcaaaattaaaaataaaatatattaattagttaaattaatattaaataaattatgaaaaaaatattttatttacacattagtggtgtaattccacgacgtcgccagatttacatactttatgaataaatataaatatgtaactaatttatcgcattgattaaataattttaaaatgtaatataataataaatattaattattattggtaatttggataatgtgttaccgtacatttgataaaataatatgtttttttaccgcttttcaaactctttaaaattgaaattctgtttttattttattttattgataaatttaaatgatagaatctttacacatttgagattatttcactgtgttttcagcttaacccttagaggtgataggattccacccttaatcgcaccaaagtctctaaaatcgcataattcccccgaattcaacacaatttacaactcttttaactcaaaaaatgataatttaagtccaaaattatccagtggaacctacaaatggagtctgaaatcaagtaagttttacactcgagcatcaattataattagaatctttgggatttataacgagtgaatctgactacaaatgtagtccaactctgaggtacagaatttacagtaacattttaatgcctggagaagatgaccacaaaatgcttaaggatttatatttgaaaagagataagctctttgacgagtctttagggaagaattgtaacctgtacagatactttaacataactaaagagaacattaaggagcatttggactctacgatggaggagttttttgaaaagagaagaaaggatagtgagaagtctgtgtacgtaattgatggaaatgcttttaacggtgaacatgactgtgaattacccttaccaagatcaatgtcaagttataaaataccagaagttggtactgatcccatagtaccaatgggtagtcaaaaccctaattcagaacctaaatttgacaatgatgtcctagacgccatatatcaaatgatcaaacccactgatcaaactactgttaccgatgatcagagtgttactgaggatcagagtatttctgagaattctactgaaagtgtagaagatttggttgagttgtatgatgaggttggagataatgattacgaggttttcgatgattataagttgtatactaaggaattttttcaagatttaaagtttaaatcagataagaatacgaaaagggatagagaattattacatagagttatgatacagcctacagcgtttccaagttacattgacccggagaatccagtacacagaactggcagaagaagggaattacaacgaaaacgagattcaggtattattataatgaataatttctgggttagggagactgcaaagattacgttggaagatggatgtggattataaagatgatattgtaagaggtgaacgggatgtaggaaatgatataaccaaggtaataacatataaaattataagatttaggaatttattgactccatcgagtgggaacaattaatgcccaaacaccaagataacaactatttcaaacggtaatcaatccacacactatttactactatttatgtagttagtattaatagtgggataggagttattatgagggtggatttggtgatgaggacaggacactggatagtttctttgatgtacaattcataggctcaactgatacatatccattcgccatttccgctggaatgcaattcacatggcccatctactggtaaacacaaccatcttagtaatatatagttattaattcttagtaatatcaactagtaatacttagtaatatatagtaatatatacttagtaataactaattaatatttggttaatatagttatttgtatgtgtattagggttccgtggttatgtaagaagaatccgaagatgaggggacagccaatcagatcacaagtgttcaatttaggcggcgtagaacctctccaagtattaactagaaatattaactcaatagaatattcccaaatgttgatgtagttatggttttatcctgaggggacggcgaattcagtggatggatattgttcattgaagttagtatcaccaccaggctggaatttaccatatcgaatttacatgtacattttcagtgaatacaatcaagtcgtaatcggcccaatgtaccgagaatcctcacaatacatcacacactcactcaatacctgcaagtaaccatcatcatactactattattattattatactattgttattattatactattattatattattataattaatgtgtgaataggttaattgggaagaataaggaggtggtggagaatgcggagaataatagggattatgtaattctaggcccatcggggaatgtatatgtgggagttggagtggtagatgagcccgtaagaaaacgtgaaagtgacaagaaatatgaatttaaatatgactgggatgaaggagactacgattttaaccaatggctaaagaaacaaacatcaaaccctgatgatccttttaccttggacactatagaaaaagagtaagctaaacacttaacacacaattgtatagtcggacacattcgatatggtatgaatcgcataagtatagacatgtgccggatcgccatatatcaagatactggaaaacaaggtttaaagaagacgtttcctggaatccgccagatttcacctaatatccaatgtgtaaatacccaaccaacactattcataactttgttgatttttatgaatttatttgaagatttacgttttatgattttttaaacatttgaaaaaatggttttaaaatcagtttataggaatttgccaagtttatatagaagtaattatatcctaacgcaacgagtaaaatatcacgcaaagagtaaatatgaaggaaaaggattcagaaaattactcggtccactctggcccctgacagtatctttaatattaataattaatttttttagaccccgggattcctacagtcatatgcccttatcacaggcttctttcttttattgtattatcccctggattcatgtttttttggtgtacgcaaacttgtaagtctattgacacatgtgtaaatatttaaataaatatttatataaatatttagaaggctgaaatggacgctaaagttggaggatgaacacattggatacactcgatttatttttacaatttcaagttatttctcatttttggattattaaataaataaatttcaaacataaaatttttaaaaaaagctctcaatttccatatttcaaacttatactcttgtattcccttatttttaccataatttaagttcattccaattttatggttttagtattatataatctttattatttattgattatttatgcttaaatttcgatttattggttatgccatggggatgtgttaactggagttactattcagtaatataatttaataaaatatgctagaataattatttgtaatattttaaaattttgtaaaatcttagttcaatatgtcatatgttagaataacaaactttacagcaattagaaacttaaggcagaatcttattgtttttcatgatgggatattccatagattttatcctcaaaggaactttcaatatactaattattccacaaataactccttaaccacattgaataatcgtaaaataccaataacttcaaacatatttgagaagaacaaatataattctaattttaaaaagcataaaaggaatttcagatatttagccttcataaccacagcaagctgtgctatacacaagaatcctgatgaatccaccgataaaaatgaagaaaataaggaggaagaagtaaccgatgaaaaggatgaatctaccacgtttgacccgtttgatgatgaagatgtagtttacttttctaaagattatacatacgagtcacctacaaaggataataaatattatatacacattgagaagtttaggtatccaaaccctaaaggcgctaagattccaaagtctattaattcagacattgattcgttcttcgtaaatccttttttcggttatttcaaacgagtaaaggatcaaatcgacagtattttcgacaattcaggcgttaatttctctaatttgtcaccgtttaatcctacgaatggaggtggaaatgcggttcatatggacccattttgggtagttttaagtaacacgccgccgacaacctttagtaacgcgtttatgttaatttgcggagcagtttttgcactttggaagttatccgaaaacacagccagcactaaattctcagaattcatgaataaacacttcatcacatcttacgaagcctttaaatccaaacgctatcacacactactcacctcaggtattaattatttagttgtataatgttcgtagcgataagtcattcatcgtttgttcattttggagtgaattgtatgttatttcatcaattgatgaagacgtttaataatcacatgtcgttttacagcacacaccacgttaataatagcctacaaacatttgtaaggagtattttctcctcaaactccacactcaacggtaactcccaacactatcactcaattaacactaatactacctaatgttactaataataacaattgtagtgggaaatgtgtcgaaggtaggaaggataacgacgaatgatatatttaatgtaatgtttttatcatcgttggcgtcaagtttgggtcacgtgtatttttataagactccagttctgggagcgtcaggagctatttcggggctgatgtacctcttggcttcaaccttcccaaatagcttcttcagaacagtatttccgctcccgggacttaatttaagcattttacaaatcggtcaggtttttgtagccactaatttgttctttctaatgaatggaaggagtccgaacatagcgtgggccgcacatctcatagggatgggagcaggagcactttactgtttcttccagcaatatgtaaacaaaagaccaggcttctataacccgttctcactctctgtgaaaacggccaagagtcagtggatgagaacgttccaaggtatgaataactgatttgacctcaaattgtttagggtttgggaagatttaattccatgtaataataaatttaaaacacattttactctacattttcatattttatgcctttattttacacatgtgtggtgcctcagattatccatagattggcaaacctattatataatatttagaagtagaaacattaaaaatgaagtatataaattcagttctttgcttaataatattattaaatgtagttcagtgtagagaaaattctgaaaattcagaagattccaaaatcgctaaggattccacatttaaccctatcaaaatagactattttgaatatgaattcccaatcaaccatcatgtaattccattttcatacactttggaaggctccgctggaaagaattcagtaaagcctgaagaatcacacaatagcgctgaagtaactaaaattatttacacacaacatatttaatttttaggactccaatgttgacaatataaataacatgaatttggaaccaagactggaaccttcctacacttcttactccttcattagaagttataacgtttctaaatcctgcccactggatgataattttttcagcaatcgtataagtaaattctcaagattcggatcaggtcgtgaaagcggttacccagacctaaacgaagtaataatttttactaatataacaattttcagctgattgagcataataagacttcaaatggagtccttttagttgacttttttgcaacttggtatgttattagggtttaatttcctgtaggtgtggaccttgtcaaaggatgaacgagaatttggtactaaaaactcaataattatttgttaggaagtgataagatcacagtatagaagtgataaactgacaatacactcagtagatgtggatcagaataaaagccatttggaagagtacaaaattacagcactcccatcacttttattattcgttagaggggaggtacacaagaaaatcgtcggactcgttgatgttaaaactctaatcaaggaaattgatctctcattagattcactataccattaatttattattcatacttcatacattattgtgtgtgctaatgtgtagtgagttatttgtcaaaatattattgaatactctttaaaatcttattggctatgtctttactttctttgtaaatacgtttcttctcaattttacccttgtttaatatagtttcctggtcatcagagtcaatatcagtccaacattctccacaaacctaaaactgtgtaactgaattaagattacttttcggcattctcttctctgaacagtctcataaagacataataagtggaatttatgacctaaatcataaatatacacaattgtaagtttagagtaccacaatctagattaaaagttttgggatattttgagccgtgaagagaatcatttaaaggaaataaacactaaaatcaattttacagaataaaccgtaccagcatgcatgagttatgtttttgtacatgattatttgaaaatattgagtcatccactgacacaggagttccatttagtactttgtgagagtcctcattggtagaaatcaactaagataaatttaaattatcctctaacatttcttttaggttcagtgtatacttctaaagttaatatacaaagtggtatagtttataaggtaccgtcgtctgattgaaagtttaactgtgaataggctttatctaaggctaataggagagatttgatcatttcatctttcttaatcagtttctcattttgttcctccacaagttttctcaaatcctctaattccgaattttccatcattaactgtaataatagtagactagtaatatatattcaagagtataataataatatgagaatttttgggtaataaaattatgatgtggaattagagttgagtggaattttccattttcctcaattccccaaattttaaagaattagacaagtttaatgatatggtcacgggagccaattaggacatgaatttcatcaacgtagaggcatattttatcctcattattcatagccgtgtcctctaaatcagaaccctggaaagtaaaggtataattaacagaagttgcatcgtagtaattaatagcttcctgaggaatattatcgcatttttcaagaaagtagtcaatgttggtccagtaattggatgaatgtgagccttcagaagggtcagtactcttgtacaactcactcaacgccagtgagaggtcctaaatccaataattaacctggttacaaaccctagttgatgcgaaggaaacatgtggttttctctgttcataatacttatcaaagccaaaagactcgagaacacggtcaacacggtcaattatcggtagaacctacaaattagattatgaatattgtggttacggtatcatcacggcatgttttatcaacgaatgagactgcgaaatagcggtttaaattctcatttgcgcaaattgaaactcgattctcgagaattaaataaaatctaaaaaattttatcgaaaatatgaaaattttattcttacggtttgaggttttgaagtgtgtttttaagtttttccagaaaggaatcgataaattgtcttcttaaatataaaggtttacataatgataagtgggcgtaactgggacttaatcttgtggatccaacttgagagtccaagtccatatcaatatcagaatgcgtgtaatctgagtctgcctgcgtaggctgttctgagaataacacattgtttaatttttctaaattaaacagagtattatatgccttttttgcgatggatgagatttctttactaatttcaactaaacatccatgaattgagtgaatttagcctacctttgatgtagcacagagtgtggtaatttccgtccacatgagggacgtttctgacattagaattactgtcaaccatgtacgaaaattataataaattaattttatgaatttgcgctagcactcctctggtgggagttggtctgaacctgttcccgagagtatgtggataattaatgtgtaagtctgggataaacttaattttctaatctaaatccaaatttaaacaatttgcataaaattttaaataaaataaatttattaaataattagataaacaatttggatgggagatacttttagtttttcttttattttcgagacgattagactatcgtgtatgtcttctggtatatctccttcaaaatcatcgtaaattacactagaaaggaaggtgtcagatgccatttcactgttcctacaaatcattggcttattttataagtacttgtttaggctggattcttgagtgtgtttatcactagttttccctgaaattctagttgttcctagtaagtttaagtattccgcagaagtattcaactctacagtctccatactcaggattactaccatatcctgtaccatctgcatggtctccttgtaatccagtggctccaccaacttcttcacacagtctaacataaattgacagttgttaagagcggtttctacgtcatcttcatcctctagtatgaaatctattgacttatttggtatcagaattgataccaacaacttctccatcgatcccaaaacacacgtgactatcttcttataattcttataactacacaacgcacatatttctaaaacatttttcaaccacaaacttaattaaagtgtggagttaactattatatgtaactaaatttgtgttacgtaggagtttgtgtgtgattgtattgagaacttcaagaggttgtctgtgtacgtgtttgaatgtgtcgtagtagagttccacgaagtattgatcaaaaattgtgaccatcttctgattaacagtttcgagttttgacaacgactctggcatgagttcagagagtgggaattctagaaaaaactcatgtaatgaagtggcagattccatgagaagacatgaaattgtacatgactctagtatactatccagtgagttccaaatatgctttacattttccacaaagtagtctaacattggaacaattactttagtgacatattttcttttagattccaggaactttaaggattgacagcggagttcaattctatttaaaagagatgttaggagattggatacttgtgataggaattggcggtcctgtaaatacatattcgctgttaatcctgaccgaacaccaatagaatcactaaatgattcaatacttaccaatctcctcattaagttcattacgtgtacattttccatttccaacaaagcgtctaaacatccaaatagaatattagagtcaaaacacaacattatcttactatcaaatttgtccatcttagtatgtttgtctgttaaaggatcagaatttccactttcaccagaggtactagggttaaaatcttccagactgccgtttaactctgattgatttaaattatctggaattgcgggattatcttcatttccaagtggatagtgatatagttgaatcattatatatggaattagagtattattgtcaaaatctgaaaacagttcatagcttgaagactgatcaaaactcctcaaatacattccaaaattaaccaaagaatttatcatagtatagataatactgttgactttttcgtcttcaaaggttgacctactaacctcgaggagatttgaggagtctggtttcccaattacttttgttaactgtgacaactctaatctgttatagtcattttccaaaaagtaatcatataccagaaatggtaacctactgtacacaaataatctagtctcccttgccaataacattgaccaatttgaaataatttcatccattcccacctctttacataaagtggtgaactcctctagtaggcttggatcttcagaataaggttgtggtactagtgaattaaaatattttgtggtatcaaatttcaattcactctttacgtttttaaacactctcatgtatttttttacacaatttttcatgtaatctatagcccactcaggatgatcaaccactgataaattgctcgtttcagactgaaatgtgtatctgaaactgaataaaacattgttcgccaatagagaaaccactgaggattcactgtttgtgtatttttccaacttaactaaacataataccagtgcaaataacctgtcaatccctttcaaagtctgttcaggctcatcttctggtgtgtcatctagaattgaataccaactactactcctcttaaattcaattaacaaattctttgagaaaactaaaagtgattttgatttgaggtcttctttaaatgaagaatcatgtgtatcgtcgttggattcatttctgagatagactaagtgttgtaatagctggacttgaattaagttttcatcttgcaaatttgaacttttaaggctggaagaatcctttttaaattttactctttcacctgaggtgttaaaattatttgattcattttgaagttttggagcttgtgatacatttaaggaatttgttgatttgacttcagtgttgaaaagacaatttttaatagattcataaatttcctcattcttaatattttccaaacctatcctattaataaatgttaaagcgatttcattctccttcatggagaaaattgagaaaatagtctaaaatattatcatttaataaaaaacttcatatagtacacaaaataatataaattatataatatattataaaatggagttattttttattcaacacctattctctcagtcccaatataaacaaacatattattctttcaaattagatttgtgtttatctgtaattttctatagattattaaatatgtataatttttatagaatttattaactcttgctggtttcattctgttaattgtactctaatattaatcttaaacaaggattctaacaattcaatataataatttagatatgtttaaatagaggaatggatgttccaaccaggtgtgtttacaacttttaataaatttttagtttgagtgaacaggtcgataaatcatctttagagtgcctgaatgaagattctttgcatagagtcacaaatactctcacttctggaattgatacttacttgcaatcctcgcccggtgagagtgaacagctgttggttaagtataaattcttgaaccctgtcaaaatccactcaatgattgtcaaagcgcttcctgacggtgtggcttctggcactgctccaaaaattcttcgtcttttcatcaattgtgaagacctcgattttcaagatgccggtaattttgaacactcaattgtctaactacttgattattcagttatttaactatataactattcaactagttggctgattaattgattgatggtttgtagagtctgacccttgtacccaagaactggtttgttatattattttatagttggtagactcttgaaagatcacatgttgaggctggagagagggttttacttcgttacgttaggtttcaaaacgttaatagtctcgctgtttacgttggtacgttcaatccaccaattactcgtgagtagctgagaactatggaaatgagagcacaaaaatcgctcatatcggtctttatggaaccactgccacctcctcaaaggttagtagtaacttaatttactcttcagatcgagaactggaaaccaaccaaggagcaggaaatgcagtaaaaactaatctgatccaccaatttacatgtattaaatgtttaacacattatgtataaacttaaaatgtttaaaaattaaaacttcaatccttgtttaaaatcaaatatagcagggccatacggacgtagagcccgttttccgcctgttcaaagaatacacaccgctcatcggaatcaacatccgtagaaacctcgtccactctcggcaacggatgcaatacctaaaccaatattaatatttccaatagttaataaaagaaaataaatttaattataccttggcgtgtttgggtagtagtgacataacatgtttgtcaattttaaaagactcctttggtggatgttctgaaggtggcatccgttccctctgaatccgtgtgacataaacgacatccacattatcaagcgcgtcagtaagctttttgaaacttgtctgtcttgagaacgccaagtccgggatattctaaacaatcaataaataaaattattaataaaattatgaatataaatatttattgtggttacgtatttggcgaagttttgttcaacttcacgttgtatttgggttggcatctgaagtgaagtggtggagacgtatctcaaaacaacgttaaaccgacttaaaagtcttacaagagagtgcgtagttctggcatatttaaggtcccctactaaacaaaccgtaagctccttttcagaagaaaataagggaaagtaactattaatggtgtagaggtcaagaagtgcttgagttgggtgttcccctgaaccgtctccggcgttaatcagaggaaccagacagtgatgtttaacacgttgaatgacattagtttcagggtgacgtaacactagaacgtcactgtatgatgataaaactctaactgagtcgtcaatagtttcgccttttgtaaatgaagaggtagaatcactcacagaaaccaccttgccacctagctttaacattgcagtctcaaatgagcatcttgtcctagtactgggttcacagaacaaggtggtcataaccttcccaaacaagagttcgacatttaacccttgtgtaacttttttcctgaaaaagtcagccacctcaaaaatacaactcagctgagaattagtcaaatcatctacaaacaataatcctttatttctaagagtagaagcgaccttcctcttcacagaatcaaaacagtgaagcagaggattacaaccgtataggccaagttcagttaaagcagttctgacccagggaacatatgaaagggcatataaagctgtaacagtaacaagtccagccccaagggcaacccatgaatgatgtaaatactgtttcatataactttaatccaagggtaaataattagggaagatagaagaaggctatagtggttaaggataacagaaaataactgagaaagtagaagaatcctaacttataaatcaagaacaattgaaatcagacatggtcactcaagagaatctaactcttgataaaaaataaaggaacttttaacacacaaaactacaaaaaaccggaataaacaaaataaacataaactattaattataaaagtaatttacaaaataaatgaatatataaaaagtgtaaaggtgggtaaaaggtttatcatgagaacaaagagttaaaagtgagatggggcctaaattagtgttttttttaattaaaaaggaataaacttatgttagtaagtggtaattagtaattgtttcaaatcaatgtatattgtgatctaactaattcttccttgtttcattctttgaaataaccttttttccaattgttatacaaaatttgttatattttaacaaattatcaatttaagctgaaatttgagaaatctgttatggaaatatgagatttaattagattaaactatctaaacaaatttggttaatgcaacaggatctaatattttattaaactactacaaagtttttattatacaaactttgagtgaattttttaatttttcgacatattttttaaattatcttttcatttttaataactaagtccattttaacggtcaaattttggtaattataatttttaaattttcaatagtgggattactccctttatctaatacacatttcaagattccaagaataaatttaataattaatcggtaaaaaatataaattaacaattatttaatatttttatgatttttgttcaataattgactgttgtggtaaattttcggaaatgcccatggattctacaagttaataacattaatcacaaatctctttgcgttatttataaataactttatacttccggtaaattgatggatatgtaaccgcaaagattttccgaataatttttagatggtatatgcagttttcgtgcagaaggagtatgcatgcatcaaataccattaaattagctattaaaattgtggatatgtgtggaatcaaaaccctttaaattatacattaagtagcaaacaaattatataccgctacttaatcgttgttctgatcaatcatataaggcgaaaatttttacacattttgaattcttaataaaggatttatctcggagatttaacctaaatttatctataacctttggattttagataaaagcgctgtttccgcaaaagccgtggaccttgccgaagaatcactacactgtaaaactaattcattggaaatcagtttccctgaaaaggttcaacaaagcacgaaaataattcactcaattttgtaaattgggctcttgttacaaattaaaataaattatccaaataccagaagttagaattgggaggtcactggcattgaaggtcgagcatcgaaaacacacttacaggtacttaatcctagttattaaataattttatttattttatttaaaattataaagatcgcaagagagaaattatggaagccggatttgagtttgcagattaaccctgaaatatgtatgtgtttactcacaaaggggtaaaatacgtttgtttgttattttgaaatttgtatgtgattttattgattaagtaaagtaatttgtgttaaaattacgtgatatgaacagttggtgtgaaacttttccctgctcatgaatctgcatacggtaacactatcaaattgatggaattcattgggaaaaaacgttattacaaaaatataataattttcccactaaattatgcttaaattagcgtgaaactcggttaatatttagtggaaggctatactgtcttggtggtgtcttaattaaaacagaagagaatgatgtgttgttgaatttcacagggttgtgaaatcaatcattcagtaatactaaaaggagtgtcacaaaattgtaattattgaagcaacactgctaatacgaaaattccaacccaacataggaacttatataccgctgccagggtctctaggttacagcataaattcacaaacgttattttttacaaattgataaaatttcaataatttaggagattatcgtaatttttctggtttttccgtagttgtagttttaatccggcgaccaaaccttctcaaacatgcgacgcctacatatataaataacctttgtaagattattttataggccgttgtaaattctaaagaatataatgtacccaactggtttatctcgcccgtatatgctccgagttagttcgaggacttggttgagagatagccacgacctgttcgattatgaaactcaccaacacgttaaaatctcccactttgcaacatcatgtccactaaaggtgttgagaaacgactcggaagtcagcgttatagactacaacaacaacgttgacagggagcacgaccaccttttgagcatagtttgcaatagagctggagattacattgtggctcctgcagaaaagatccaagggtcgcttttgagcccacagaagctgtggttaattgtgaggacgctcccctcccaaagatacccgctccaggaaaacgatattattaaactcggaagattccgcctccgagtgaagcaattagtcccaggaccaagtgtggagactcccgacagtagtagtgataacactattggataccctgacgatgtaattaactgcggcgagaccaacgacgcccaaattgtcaagttgtttgatggcataattccagataaaaccatcaccttcgaggagcagtgtaatatccagtgccgtatatgtttatctgaggggtatcttcactacccatcctcagataacacgccaaacaccacccctgcaaacagtagtagcaatgatactagtttggatattgattcggtgactgggaagatggacatttactccaacccgctcaacagtaacacgagcagtgtcacgtgcagtttggaccccaacttggcagatgcgtcaattgacaaccttgagaagtcggcgaccttcgagtcagatcggctaatttgcgcctgtgaatgcaaggggagtattaagtatgttcacgtggagtgtttgaggaagtggatcgactccaaatggagcttgagaggtgaggacccactcccgtcaattgtatttataaaggaagtttcatgcgaactttgcaagaccaattatccctgctttattagacaaaacggggagctgatccagattgtcaagatgccaaaaatgcaaacgccgtttttagtgcttgaaaacacaactccacaggctgttaggggagttcacctggtgtcaatgagggactctaaggatttaaagctgggaagaggacacgagtctgatttgagaattccagacgtctccattagccgttatcacgccaacatcaggtatgaaaacggtcaattttaccttgaggatcacgactcgaagtttggaactctggttgccatgaagaagtcgaggattgtttcatcagacgagccacttgcagtccaggttggacgttcagttattaatttgactgttgataaatctttgccgtattttgagaagacttggctcacactcactccaaccccgcctgtttataacactttcgatgttccaactaatggaagtggtaacgttgacttgaacctaaattcagctccagtcttcggctctcaagcatacaacagtatgattcccactgtaaacgtacctaacatgggtaatggtaataacatgagtaatcagggaaacatgggtaatcaagttaatatgactaatcctggtgcatttggtaatcctgtgaatgtagcaaatttgacaagttcttccaatggtgttaatgttatgcactcgcagggaattagtccgaactccaccgctattggcattgatatgatggaccacccaatgcatcccagtggttatatgtcattttatcagccctcgtattctaacccagtccacattccaagcccaagtaactctaactcaattagcaacggctcaaacaactttgcatttcaacaaggttcatccacgcccacagcaccaactaatggaaatggcggtaatgtgggacctgctcatacattaccaagttccggccatggattacccagtcccggtcatggattacccagtcctggttccagggttagcccacttaatgatatatactggggttgtctgagagaagctgctagacaaaggtttgaccctcacgctctcgacggtctcgccaataaccgtctcaacagctttagactcaacccagtctcgtcaagcccaaacatgaacaatggcaatggcaatctatctatgaattccagtggtgtaattagcagtagtagttccagtggtatgagtagttctggccagatgaaccctggtaacagtagtagcagtggaatgtccatgagtaatagcggagaagacttggacatgctgttgccggacacggtatttatcgcaaattggaataacctgccaactagaaacttagatttaaacggggacaccagcaccagtgccctggaacacagacactctcaggatttggataaaccaatcactcgcatttaattttactgagtttaatcttttcaacaaatttattttcacatttttttttattattattttattagtattataatattacttgttcagaattatgttaatgtttatacacttattttactactgataactgcatgtatataaaatgtagtatattagttgtttataactcggggtgtttttcagttttatcctcaggttgaggttcaggagtgtcagatgcctgtttggcgtcttctgaaggtttttgagtagagtcggaagtctcaggagtaggttcgacaggtgtttcaggcttaggagttgatgtgtcaggctgactggttgcatcaggctggggtgttggtgtttcaggagttactttgggtggttcaggaggaagaattgattcaaggttctttaaaactagcttgctaacatcaagttttgtcttgatagtagttgagtcaaagagcccatcctcatgaagaggcaggttggcctgatcctttttaacctgctcccaccaacttacattgttgttgaagaggtctagagaagcgttttgatctttaagaaacggtttctcctcgagtaatttgtttaatctttcctgtaattctgagaaattatcatcgccaaacttaaccagagattctctattaaggttattattcatcctgttgtaaatgggagttcccaaaccattgagttcatccaaatgtttatttagcgtctcagaagtagctgagtatgaattttcatcaaaccaatccatgagaaacttaaccttctcggtcaaagtctgttcctcatttggtttacaagctgacttgaagtcatctgactttaaaacgcccttgtatttgtaaagagttgattccaggcggtttttcaactggctgcgttcaatggcagccttgtccttatttaccaataattgtatattatttttactctcatgtagtttttttaaatgatatacgttaactgtgttgtcaacaaattctaaatttacactatcatcaactggctcttttggtgatttatccttctgatcttgagtggtcttgctgtcctttttactatccttagtcttatcctcttttttactatccttagtcttatcctcttttttactatctttagtcttatcctcttttttactatccttagtcttatcctcctcctttttatcctcctttttggcatctttctggtcaactgttgttttatcttgtttactatctgaagtctcagtagtggtttctgaagaagcatttgtttgagattgtgaggtatccttttctttatccttcaaatcagtttgttcagaactagactctgtggtcttatcttttaaatcgtcaacagttttgtcagtgtctttgggaaattcaccagcagatgaatcaccctcaggagttttatgcgtttcatcgacttttttagaagattcagaagaatcagattctggagacttatcttccggtctctctggtccggaaggttcttcagaatcactagattcataaccactgtctgtagcatcggaagtcttcttagtttcagactctttcttagattctggactggaagtgtcttcgtgagttgagtcggtagtatcagatttcaaagtttcagattttgtggtgtcggattttgaagtatccagagcctttttaactggctttgccaacaccttattgagactaattaagccgttctctgttttaaatgatagcgtaacctgggcaagcatgtcatttttatgttttgagagtaaatcgtcaacgcccttgattttgtaatccagaaccttcacttcacttgaaggctcgtttgggtttgaagtctcataaattgtcacattgaaattgttaactgtgttaacttttactattttcgagctattaattttgtccactgacttgtataaggtgaccctcttgtccaaatcaggtcctttgacgtgtaaaacgtaatcaaaaactgcattgtcaaaaagttccatttttttcattctgaaaaatgggttgtgtgcagctgcgagataaccgcagcccattgcaattgattcctctgcgtttaaatgaaaacctaactgtagtggttttacgatttccgataatttggctgtaactgagggtactctccacgctcctcccagcatctcaacactgtccaaatcactgaatttcaagtttgccttctccaaggccatgttaattggcacgtgtaactctttcaggacaggttctaacaatttgtcgaattctgacctcgtcaccttagcattaaggtgtttattttttaccaggttgtccacctccacggaggctgaatttgagagggataacttcattttagccttgttagagttctttaggagtttttgtagtgattttgggtttcctggcatcaacttgaggtcatgttccctttcaaatttattcctcaaatactcggccaggagcaaatcatgttgtcgtccaccgattcctgggtaagtaacacacgagagagttcttatctgagggaattccttggatttaggcggtggaaccttggcctcaacaactccaacattagccccaaaactgcccaaatcgtagtacattattttcctggtgcccggtggcatttccagcgtatggaaccaggctgctgctgatattccgtggaccaaatctactacctttaaaccggcactttctgctgcaaaaaccaaagccttcctttgattctgggtgtagttgcagggaattgaaatgactgccagcatctcaacgttggaatcgtaggattctatggctttcagagacaaaagcttctcaagagctacatgttttaggtgattaaaaaaatgtccagttgcttcttcgagtcctaccattgagtccttgaggactttgaggtgtagttggccgtccttcgaaacgccgaactcgtacggggtataatcccagtgaaatggaacattattttttttcagggtttccacaacctctgatgcctttaatgttgagaccctgctccattttgagttagaagtgaatggaactcccaggaggtgtgccgatttctgtaaagttttactcgggtcctttacagagaatgaggaggcttccttgtcaaataatctggtatctccgagcaaataaacggcgttctcaaatttcctacttcctgttcctgtgagtaaaatgtcaggtctatgtcctctgaaagcaattgaagcctcaacgaattcttctccccaatcaatccctaacgtgactgaagttgattcggcgtggtttataaaataaaagaaagaaggaagtatgtacaaagaatatcggaatctgtggactaataatgtaaaaattatgatacagaagttgtttaaaatcctcatattatttaaatgtttgtaaaattagttgacaaatattatacacatttatgaaataattaaataaaatgatatttggtactgatgttcaagttggattccagatgcacaacaatactcagtaacaaataagaatgttaaattttacatctcaactagagtgtgtcgtgttaaactcaaatatatagtttgttttacatgaaaattgactttttaattatgtaactgatattggtgagaatattagtggaatctactagtgcttaaactgataaatcttaactcattgtgtgttgaattggcctgtaccttctatgacgatgtgaaacctcaacttcatgtcgagttttataatattccagtacatcttttaaatcaattttggcctcgggaattatattaatcctttcagctatattgaattcatgtgttccttcattttcctcaaactcattatttatagactgctcattgatctcttcccatttattacatgccatttccaatgttttattgagctttttcctgtgatttcttataacatccttccaaatctgtttcctggtctttgcgacttctcttgattcagccctaactacaactcttgatatactagatccattcttagttatatctttagatatggaagagtcctcggtttttttattcaaagagagaaaattaacatttcttatctttttctcttgatcttttacttgatatttagactttataaatggcagtcttactatagtccctctgcaaaaactttttagaattttattcctgtagtattttttatacttaaccttggaaaccgaagcatcggggtctttgggtatgcaaattataacaggctaaaatactatgtaatatatttttaaataccgtatcatgtttagcgtaatcacaattaacgtaacagtgagctatgtacattcccagtgccggactgaatatagaagaagttattttacctatcggcattctagtagaactggttaaaattgtacaggaaggtgttatcattttattagaaattaggccaacacgtctataaattaagttaattaaaaacacttacacttttgaaactccgtcaaccatagcacgacctaggtgtttgtggccaaaaattattcttttcctgattttatgaatatctaagttccacataagagagcaatgcattggtgtggattccggagttaggtctaaatcaggtcgaattataccagtttccaatcttgcgatgtcgtatgtatcaaatccaattgtcttcacagattcatttgataataataatctataattttttataaaaaattaaacttactccgtaaattcaccatagtattcatttggtataataaactcgaaaccatcctcaacatccagcactcgataacaaataatcctttctgggtaatctttgaagtttatataaaaacttttcataaaataacgtagatattgtgaggatgttttctcaaatgacccgtcaggctcataaattgagatttcaagtgatttctcagaaagtagtttactcaaaacatcatgtgaaagtggtccgtataatccaacaacagtgtgtgtttctagtggatttattgaaatatccatccctatacccttcaggtgtacaacatatgcgctaatataatctagcaaaacgtttttcttacttccattggtaatcaataggtaaaacccgtctagttttaccactagacatggccaataacaatcccatgagaatccagtaaaaaactatgtgaaacatcatttaatgccattggagaaactgaatttgataaaatctggtttaaaaaataatcggaattgagaccataaactttaattgaatgcgtaaaatccttatgaaaaagtccagaaaactgacgaagatgaaaataatcagaatgttccgatgaattatgatcatttggaagattaattttatggatatccgtgaaactcagattgtcattgttatattttacaggtggccccaaatgaacacttgatagatgattgtggtttgatatgtattctagaatgtgattgattttatcatttagttgtttgggaggattttgagatattctgtgattgaatagaatatctagatattcttgtcctaaatgataagtgtgtgaagatggttcatctaaactaggggacatatcttgattatatgagtgataatcgtgattatgtatgtcatcagatattgattcacggttttcatctaggttatttcttatagatatgatttgtttgatgattttcttatccacatcaacacatgagtctatggcatgattgaattgatcgtcatggaattgaggtatgttacctaatgtacttaatgggtctctagaccatcctcgtggtctaaaccagttagctctaaacttattttgatttttaactgcattttggctgatttttgttgttacaacattccttcttagaatcttactgataaacaacatacaactccttaataaaacatagatttatttacacattaaattaaaatacatcaaattatttataaagtcaattaatattcaaataatataacaaattgattatatttcattagcatttcaagtattcaatgtatggggaattaaataagtgatttggcggctttaacattaattttgtctaaaaataaatacttaattgttattgcatattttgtgttgtggtaataatggtccacaacgtgtttgcttgggaactttttcattgattttgacaactcaattcaatgaaggtatactattatcattcatgagaattatcatgaatcttaaactacgttgttgctttaaatgtaggatatgtaatattttgtatataatatgaccagcaacagcaatagttgtggagcaggatcaggcgaggctggaggtggtggaggtggagcaagtggtacctcacttacacagtcaaccccttttaactttagtaattttgggattttagctgtgttttgtattatattggcactatcatctagtacatatcacaattggccggctatagaaagaagcctggtgaatgatagagtgttccaaaatttctgtactgagaatgaaatacgggaatctattcctgggatgtacgtgtgtgagaaacaaagagatgccatcggtaacctatcactaaacatattcttgttcgagtttatcgcatactctattggcggtccattggtagatgttgttggcgtatacatagtaatggttacgggttttgcttttggattttctggattcatattgttatacttttgtcatgatagcatctttattgtcaagttgagtttttgttgttgggggatgtttggtggactaatcattattactgcaattcattttgctagaatgttttctacagccaagagtttggctgacgggatgatgatattcttcgaaaacttcgcatctgtaataccattggtaatttatagacttattaagagattcgggataaaatactatgaagcttatggaggttatataatttggggaatatttccttcgtttttattggcattgtcgttcatgcccataaaaataattccagaaaactataatagttctaaaaataaaaacttttttgaagtagattttaaatgtttttctcaaaagttattcgattggaagttgtgggcaaatttggtagtattctcaattccagtgacatccgcaatgttttacaggaaaacattttctgcttactttcttaacaatcctacacttcagcaagtattcccattcatacttttgtttgtgtttcttcctataccatttatatctgctcttgaccagtttataagtgttcacctcacatctgcattcctgtatattctttacatattggcattcgtgtgttttttctacagaaccagggctcatggcattatttcaatggttttgttctgtattgcacattccgcggaacatcagatcatgcattacatcagtaaatctcacacggagtttgagtcaacattaatgggtatttcatattccgttgtatttgtggttgggttcatatcgcagtttgtcttcgattgcatctataagttgtcgccaagagctgcattgtatactatcatctcactcctgcttgttgcaacaacgttttctatagcatttcaacaagttaacggtagtaataatattagtcaatctcaatcttctggtctcaaacttagtagtctcagggtagtatatgtcattttctggttcattccatttatttttctaacactatcatttaagtcattatatagtaaaagtggtgaaactaaagatgaatcaaattattgtatatgctataaggctcattatccggaccagaaatttgtcacgacaacaatggtattttattcattctcattttattacgtttgcactgtatttactgttatttctacaattttcaagttatgtcaatcggctacatttgagtatgataggtataggttcatatggcttttaatatttttaacttgttttttcatagttcctcatattattatttcctttcatttttggtttggtcatcaaaaacatgaaccaatttttaagttcgttatagttttattcatttgtaaaatattgttgttcatacagtccatgatgaaacatgctaacactctcatttacttattctcaggatttctagtcctttacggatatacattcttcttattcatccacatgcttacctattataactttcaaatcacatacgttgaaaggttccacaaagttagcttaatacactgtggaggaatgtttacattatttctgttattgagatttttctatcttaaaatgtctaaatatcgtttcggatattatacattgtgggcatttaacactggttattttgcattctttgccattcagctattttattattttccatacgagatggatatatcttttggtacaccaaatcttcctgttcctcaattttcaaagtttaaaataacggaacttaccgacgtaaagtcattttgtacgagtctttttagtgtggcacttgcaatatcgaatctagcaattttgataagttttaagttttgtttaagtttaattgtcgtattattttggtgcagttttaatgatttagttggtttggttagctcaatttgtatcagagataaatataaagaatatcattctagtatggtagattatttcattttaccaatatcatgtgtcacatttgctctgtttgttactttatttttataccattcctttatgggtgaccatagatttattaataacggcttcgtttttgttttgattatttgtagttttgtaattttgtcctactactcaaatgtctcctggttttatactcaatacgagttacaaagttgttgttgccagcaaaatgaaacatgtcagtgccgaaataatggcaaatgttgttgctgttgtaacaagtgtacctgttgtgtttgccgtaaatgctgttgttgtaaacaaccgtcctctcaatcccaatgtgaatgttgtaaatctcaaggtaaatgctgtttcaaaaccgattcttgtacatgttgcaaagatccttgtgactgttgctccaaaggcaatagctgtaatttctgccctcagtgtgaaaaatgtgtttgtatatgtttaaagggaaacaaaatcaaagataaagaaaatggagatatcatatttaaattcttcgattgtcattttaaagaggtagatcacggatttttcgcattttatcttggaaacaatgttggatggcttttgttcatactttatttggccttgtcaagagacaaaaatgtttatttgtcatttagataactacttaatctagtagtccaactatatgatatttaagtattgaatatcctttcatataaataacttcattaaattaagcaaaaatcttacgcaatttaaaatccttattgtagtcagaagtgggcttaaaaagacgccaagtacggtcatatccagcagaaacaatagaattcccgtcaggagaaatgtgtaagcccataacacggttgtcgtcattggttaaaaccttacgacacttgtaaagtgaagtgtcccaaattttcacgtgagtgtcaaaggaactggttgcaagaaatctaccgtaaagtggctcgaattgaaggtcacttaccaatttggtgtgagtcaagagtgaagtaatgggacggaacttccttaaatcaaagattttaaccgagttatcagaagaacttgtagcgaaaatatgcgatagaagagggtggaaattaatgccagtaatatcagcgttgtgaatgcactgttgaaaaatgtgtttcccagtacgaaggtcgaaaatcaaaagaactccgtgttggtcaccagatgcgattaagttgccatctccatttatagcaagaccataaactgagtgagagtgaccctcctggacgtaaacctcggataatttttctaaatcgaagagaactacagtttcatcctcagaactagaagctacaaagttgttgcaaggatggaatactaccctattcacccttaaatcgtgaaatttactagtgtgcagacatttttcaaactcttcatccttaattttagagaacggtttccataaactgagagtaccacctgaaccaccagagaccaaaagtagctcattatcagctatgctactagggtgaactctatcgtaacaagagtgatttgagttgtagttccaatcaaaacaacgagccatttcgttagagtcgttggacaaactaacgacctgtttatacttagaatcacgagagtcaaaaatgttaatctcaccgccgtagctacttgaggctatgtacctggaattaggagaaaatttggccatagtaaggggccttgtagaagcgagttgagaaaaggccatagacatagactcggttaaaaagtttccgtagttctcaacttcgtctttatgctcgtattggtcacagttagatctgtacttgtgcaaaagcatcttacgcttaacgctgcgattccaagagtagtgtgccagagaagccctaaaatgtttgacattctcatctccctcagtataaaacagttccttgtcaccagtctcagaagtgtcatattgaaagggggtaaaatcagcgaatctgcccttcttgttgaacagatttgacatgtcaatgttaaacatcctaagaacctcatagaaattcttagcatcagctgaacgtgaaattgcgacttcaatttcctctcccctgaaatagttatcatagttttctaaaagaagccttttaaggcgttctctgcgctcgtagttaccctcgccaaacaaggttatgggctcaataagtgagcggaatatttttttaataacttcatcattagtggttattcctatatgcaaattcgacatgtttgacttcatttcaaactccttaagaactgcaggatcaaccttaaagttctcggaagaattgtttaaatcgatcatttcgagtataaattagcccaaattttttaaaaaagaaatatcatttaaaattaaagttaagttgaacggatttatccagttatgataagataaaataataatgttagaatgaaggatatagaagaatcatcatcccagacaaaagacttttaaaattaaaaataaaataaaatttggacctaaaaataaaaggaaaattaattaataaagttttatagattaaaataatgatcttctggttaattagaatcgtttgaaacatcatgtgaggttgaggtacgatctatcgaaaatttacacattgtaacacatttattaatatcgagtacattaatttcaatatatttttatttttgtgttttatgtgtataaactcgattcttttaatttttgtaacatagatttgcacatttgccatttttagaagcatctagaacacagttatcatgaacttgaataatattcatatattttaaaaaattccaaattttaacaataagataacctactgtgtagacttttgacaatgtcttaaccgttattttgttttccttatgatgtatttggaccaaataaagttcagctaataaatttgcagtttgattttttgtaccactttgtaatatagttctaattttaatttatcggtttaattctaatactagtttgaagtttattgatttttacttggatattaaacaattcaattgaagtttaacacatttttagcaatgttgacaaccaatttgttgtaacttgtcgatttaacagaagtagttcagatggtccgaattcacgatttcaggcctaataattaaccataattattgacaaaagatcgataacttgaaaggataagtcaaaatgtttgaagataaaatcatacaactgttgaataacgtctttgactcctatattgagggtattgatcaaagtaaactggcgcagattaacctttggggagggaaaatagttttgaacgccttacacctgaggccagatatttttgatattttggagctcccctttcatctaacctttgggtattttacacatatatataggatatttaatgtattgtactaatgaacgtttagatttcttgggtctgtggtcataaagattcaaataccaattatatctctgtcgagaaaaaatcttagcttggatatatcggatctgctgctccttatgacgactaagccggagagccaatgggacccagagctttacagagatgaatacctgtcaaccaagatagcagtgctttcagcagaaagcctagaattggtggtgaaccaacttgaggtaatttaaaacaattagtgtaaaatcaattttagggtcaaggattcttgtggaatacagtactgtcatttctggataccttggaagttaccatacataacatccatatcagagtagaagactacacaaccaataacaatgtggcatacgccttcggactagtaatcaaaaacgcattcttcaaactaaaccttgacaattcaaacgaaatcaacgtcgactttccgtttcaggccctatttacacacgacggaaaacttcctcactcaatcaaacacagaactattgatttggaaggatttggaatgtatatagaccagctggaccctttatcacacctcaagcctgttgtgaaaaccagagaagatataaatttcaatgacattgagcctgatgtaaatggatccgaaagtcatgaacccaatagaaatgagttaaacttcaccagactgagtaaatcatttaaaagaaatagaaggaggtcgtatgcctccaaagtgtataatagattctcagaaagcccatcagtctaccgagttgcatttgaaaaatatcaagacgagcctgaaaaagagccacagaagataattgaacatacaaatcatgtgtatactaggttattttctagtgtgttggattatttggtcacatcaaggcattctgttagctgtagtcatttccaagaagttgaaccagacccggatagttttaataataccgtttgggaaaagtcaaataatgtacaatataacaacagtatcaataactatgtgagaacaatccgaaaatcaaggacttcatcagacaatgcggataaagtcaactcagttaaaaagaggaagaagacatttgtacgatcaagctttaaaccatatagatcagaccaggatttctttataacaaacgtgtttaataaaggttctggtttggaatcttcagaaaaatcagagaaggtaacttctgaagctaaaacgaaagtgatagttagtaacagctggagaatacacctgtcaaaattctgccaaatcagagaacaagataaaaagtccacaaagtcctcttctgaaatgataaacaacgcattaagaagacgtaaccagaacgcatactttaacccagatttcgtagatcttgatgatgcagatggaggttctgcaaatccagagtcgagaccaagtgatagagaaagctcaggtgttaagggaaatgaagacaatttggaagttgatgaagaaattttgaatggatttgaaaaaagacgtaagctattatcaactgaaccaactccaaagaggattaatgaattatcagatgctcgtaaaaaggttgatgatttggatgatatttcagaaagtccactagaaagcgtaaatagcagtgaaatggaatctttaggttcaaattctagcttagaacgtactgttgagagccacgaatctgaagtcgaagaagtgatagagaatgattattcagaagaagaggtgatagaatctgagtactctgatgttgatgatgaagatgaggaggaggggtattctgaggaagaggaggatgtgatggagttggaaagtgatgagaatgaagttaaaacaccagaaagagttattaattttgagagtaaagttagtgaagccggacaaaacttggatacaccgacgacagttgatacaacaaataccatctctgatgatccatttgcatacgataatgaggagtggacatgtattacatacgtactcagaagtggccataaagacaaaatcgatctttttataaagggtttaaaagaggtagaacacaactacatcttgaacaccagagatttcaagggcctgggttcgttctttttctgtacataccccgtccttccgaccaaaaagtacacttcatgtttgtcagaatgggggtctaagtatggaagagcttcaacactcaaaaacgactatctcccaatgtgtacaatattcctggtctttgaagacctggacatcatcatgtcaaaggagcaaattgagtgtatatttaacctaattaaccacaacgtactcaaattcttctattggatctcaggaatcgcatacacttttgagaacccaagagcaagcccggaagatgaacagttgtacatggaatactggccgcagtttctgttgtcgaacccgaatgaagattgtcactcacaaactaaagaggaagataataaaagtaaccgctcctcaacaattgaaaaaatcatctataaaggagatgactctaccttgtccagcgagagatcaactaaagtattaacaggaaaagcactaagccagtttgtatcagatttcgaaatcttgcattcataccaggtagaatttttttgtttatttttatttaaataatttaaaatataccaattgttaattgtgtttagacaataagagtgctgaggaacagagcaacggatgccctgagtaaactgatacatggacacacaaagagttcagtcttttggaagatgagctctaacgtaaacgaatgcataacaaacgcacttttcacaaacatctgctcatcatacaactcaaccgagtcaagtaagtcaggtcagacaaactcaaagataagagaaagactgaagtttgttgaaggaatatatgaaatcgtgtcaaaacaaaccaataatggagggatgataaactcactaaagaagttatcaacacaacaaacattcacagtagatttggcactggatgtattgttcttaaactccagaattattgtgacaaataatatgcatacttcaacaggtaactctttatagatttgttaaatattaaataaatatttagataataaaactaaataatttatagatgaaacgaatgtgaagggttatatattgtcagcaaacggattgcatatattttaccaggatacatttggacgcgacggaagtcagtttacagagtttgaagtgtctcctttcacggttttctcacttgatatatctttaaaagacgtcaatgattatttaaattactcaactgaagttaacgggtttaaaacaaatggagtggaccaatgtgaaaccaagtgcatatgcgacattctgagcggaacgccatgtatactgcttacatgcggtgactgtaacatggaacccctgagaagaactaaaaagaacatcttttccctatttctgggagatgaagatgaaaacaatttcctgccgccagtgttctacatgtcagtggatttcgaccatttcagaataccagaaacctcagatatcaggataaggttccacatggactcagacctgttcatgcacttcccaattatcgacgaattgaaccatgcgctgaggatatacaagtataacatggatagatactcgtcaacatgcccaattatcatcgatgataacgtaaagagacaagaatacttggcaaaggaggattcagtagtgtatgagctggtcgatttgggaatagagtaccagagaattatacttgaaggttctgtttcttatctaaattatgatttcaatattgatattgacaagggaattttcctgatgtttgacgttaatttgaagggctcctactttacatactcagtgaccctggatgtattgacagtaaagacggtgacaagaaacctggtaaaccaaatgtcgagaaactctagtattaatacctcagagtccacagattccatttccttggataaagaagagttggtgtattcagattcagttcaggatgggacctgctttaataataaattcaacatattgggttcaagcaaggcaaattgtttgggatcaaaacaacaagcagaggattatagagatttgaaagataacgaagatttcagagattgtaacccaggatatgaccagaacagcctgaacaattatattaacctgtattcaaataactactcagaggagttggagcacgacgggtatgacctgcacctctgttcattgtcaggatttaatgtggactgcttaaacagtgtcatcatggtaaacgaacgcagcgtgtacatgggtaaaaaatgcagtatttcactaaacaactaccttaagtccgtcttgagaataaagacaaagtacctagataaaatagggaacatgagaggattcatgaagtactttgaaaacaaggtgaatgttttaagaatagatcgcgacgtaaagttaatagttaaaactttgacgaacctagtcccccaaaataacccaaacctaatagcctcactagatataggaagcatttacataagcttgagagacgtggacatggtagggttaatctgttcgctatccgactataagcagattatactaaagtacgcaataaagctggacgtggtttctgaccaggatatcaagtcaaatgatcagaattttaagaagtttgtgaacaaataccataataacaattatataaaccagttgaaggcgaaagatgatgatatggactattttgaagatgtaatgttaaacgcctattataactggaatctcttgcaggaatcacagatgagcaagaggaccaagggtttgattaagtatgaaattaatatgaacttccttaatctgacatttaaaagactaatcacatttaacactaagaacagttattacagcacacacgagggtggaaagacaactagtagagaattttctaaggggggccaagaggagtttggaggcgagagagaaggctccatatcaatgagccgtaagagcttgaataaaatagacaatactaactatatcagcagagagggagagcatttgatagatttcacaaggctagaagattacgttaagttttacgggatatcaagtccactgttcagcctaaaacttacggggttcggatttaaagtgggatttttggatactaagattgagagaatttgttcatatatcggttcattggaggtggaagatcagtcgaactgtgtgccgttgtacatgtcgactttgttttcaggaggaaatacaacaatgatgtggtcatggctgaaggttaagaggcaatatgacgaatttaaatcaagcttaagtatggcaggagattatggaaatggacgaaatagaaggtcaaatacagttagtgggacagtgtacgactactataaacgtgttcagagatatattaactcgacaatggactttgacgcacactcccataaccacatctataacgtagatgaccaggagaatctcgaccgcatagtggacgagttgacgaacattaagaggaataggaaacagacgccccaggtagatttggaagaaatgtactttttcgatagtaaatcgtactgttccaagaagtctcactactctgggagcccagcaatgagttcttccagtagccagattgccgaaacctcagtgagtaaaataatagatcagtataaagatgattatgaggatccggatgataatgagtctgataaagaaaattttgagttggatggaagtaaaaaggatagtcctcgcccgaattatgaaccattgaagatattctttggtgggtgtccttgttttgtaagtttatccctgatatcaggtacaactagaaactgtagcatatacctgtcaagctcaatagtaacattaccactggagattatggagtctataaccacatacattaactcgattaacgcctacataaaggataatattaccaaaaacaagacaaatgaaactcaagacaaggctcccccaaaggacgaagattacactgattatacagataaccttagtgcctgtgcctcagaagatgatagttatacaactgatacctctggaagctcatcaagtgcgtcaggccctgcgatttgcgatagcactgatgaatcaagttgctcaggaacaatgagtatctcaggcagtgtgaatgtgggagaggatagtgaaacgatagtggatacatcctcctcatatgattctaattatccagattctagtccaagaccaaagggcgtaacacatcacaagttctatgaaccacatgttacctctgaaaagagtttctcattccacatccacgtgggaatcagctcacttaacctgttcacagaaagcgcttggactggctatggctacttcctcaaatatctttaccataaaactgtggattttggcagtcaagattctgcgaaaggagggttggaatctaggaaacataccggagcgagagcaagttcagatagtagcaagacaagtgtagagggtagaagaaataaggataaaacgttagtgagatgggcatttgtgaagaatataatacatgataagaataggaaggcctacatgatatacccaatcacacttaacataacaggtcaaggttcattgtacctgacccacacaagggttagatcaataaaacttgagaataaggagtctgaagatcaatcaccaaacgtgtacagaaataccaagtttgatttgtactgcaaggatagcatagataggctgtttgaaggctggtcacgcttcatgccctgtgtgtttgaggttaaactaatgtcaagaaatgtgtccgtaaagatgacaagagaggcctcagggatcattttaacaccctcaggatataccttgtgcgacgtgtacctagacgtttcaactgagttcagaaaaaacagagcaaactttataaagtttataaagatgagcctgatatacgataagaagtaccagccgctgttaaatctggcgaaaaatagtctcttcgacccaacgaacctgaacactagtaggataatagacccattcagatcaacattaacagtggtgttttacctgtacggaaacaaccggaacatgtggtctgatcagataatgccgcagtcagtctcagttcaccttaaactggagcctttgaatatagtagtcaattgtgtagatatgttgtgcttgattgatttgttcacactaatcatttcacttataaacctctacaagcacaggtacacgcttgtgctccatgcctcagataggtttttaagcctctgcaacgatgatgagtctactttagaaaaaatcagaataacgacgctgttttcaagttcagcacagacccaatttgaactagggtcagtagatgatcaaggtgagagcgtgagcagaggaatgagtgggagaccaagtgaacatgaccggaattcaacattgtcatctgaagaatctttgatgaatactaggagcatttcaagcaatcaaactaattcgaggacttcagacactgaatatgacacccagctcgattatgacctattaaactctcacaagactaaaaggccacaagattcgaggtcgaacacttctgcatatttgcctcttgatgttttggattcagaataccaagtgagaagacatagttcaagcattgacgtggtaagagataatgcaagcttggatgatgaacgttatggctcaaacgcaatgtatcataacacctcaaccgatgatatgggtggacgtttgtttggttcagattgccaagacgccagaagcacccttaacttcggacaaacttctgatctggacaattattatcactccagagaagattacgagaagtaccaaaagtacatggagaaggacgaggtcatgagctcaacgaccgaatacgatgattctgaggaccagggaattttaattagagtgctttcgagtgttagtatcggtgtttcagtggagctggagctgatcaactttgagctttcaagtgatgttaacacctcagtgaagcacatgtttgcactaacactcgaagacacaggactctggttctggatcaataacattttcgactgcgaatatttggaggcaagatctaggctcccttcactgtatttagggcaacagaacgctcgcaggggaatttggttcaacgacccgctcttgaacaaggtggacaacttccagaatgttggggaaattgagcgtgagaataactcttatttggagcagttctcgggaattctcaggggaggcgtgcttgagatttcaacatcctctctcgctcatgcaatgaagaagtccagcacagaccttattacagatacccacattattgttgcgcaaccctcaaatgcaagtgccatagatcaaggtgctccctacattgagttaccagaaagtacccgtgaagatgttaccccggtaaacaacacagctgttgagacacaagatgaaacccctgtaaatgtaaatactggcatattgaaatctacaaaggagggttccggcattggtaaacctgagcgtttaaattcggacactttgatattgattaataaggagtatcaacgtgaaaatgtgagatatagcataaagagtaaagctgacgtggaagagaaacctgagcacttgataggagttccagctgaggaggaaccgcacaaaataggactcggagatattttacacgtagacgaggtcattgacgttgagaaaataccctccatcgcttcaattaataaacttttgagccccgaagaaggtatcttttgttagattatgtagttcattacaaaactaataaatatacatctgtaatattagttattttagttaaacagttgtggtcgttatttactaattctagttaaatactgcttatcaattgattagaagaggatattgaagttgatgatgaggatcgagatatcggtcactgttttagagaaaatgtgaagaactttatacaatttagatttaaaacgagcgtgacttttgacctgtgtaaggatgggaatagagaaatggcagttgagacgttcactgttagcctggcaggctataaaccctcgcttgcatgtaagttattctcaagacttgaatcctcctggattaacgttaacattacactgagcgcggcagagtgttattttgggctcctttcatacttcacagtcatgcttaagctgaagcagatgttactgcagtactcaattgatgagtcaaagttgttggactcagttaccaagtacacaatccatgactacgtgccgaaaatatctagtaaatttgacccttcaaccataaatatgattgagaacacaataagacagtcgaaggaattttcagaatatacgctgaggttgtcgagagagtacagcagctcaaaatttagggattattctgacacattgtcaagattttcgaaagatttgtcagaggccaatttgagtgagtttggggataataatgctgttttaggtaagctgtcgagagacttgaggctaagtaaaatgttcattgatagtaagctgagtaatcttagcatgtcatttgaacccgagaatctggctgacttgtactgtttacccattagcacaatgtccaactttgagaatctgaccaggtacttgatttacaggtacttcaacggacttcttcagccctcaggagttatcgatgtaaattcggtgatttctgaccttttgaagaccatcgctggcattaacttctttgggattaagaaggttgagcccctatattacgcccatttcaagcttgaccaggattttggacctcaaaataaagcaacgaaccagggagaccagatggacgagtttgacaagatcacagccaacaaggatatatacaacgtacaaattgagcacaatgtggttcacgttggaagattgggccatacaaatgtgtttggaaccactacaacagaaaatgtatcaagtttccacaacgacttgggaatacctattttactcgcaataaaatccagtacaagtcagataaatacggctgacagagctgtggagatgaagaggaacgtgtcgagtagtgtgatagataaggaagcggagaatttggcaggagaagatacgtacagctgggtggtgttaagtcccggtaagtcgatgagtttaccaacatcacattacgggatccttgaaccctttttaataagagtccagatcgacaacaaatattacgaaatctcatcaactcagctagatttcagcgataataacgcccaaatcatgttcaaacttagcttaaaccccgaagaccctgaagatattgatgtaattaatgaatctaaggcatctaacaaagatggagtagatacgaaaatggacctgactgaacccagtcaaaaggatgtaactcgtggaaaaagttataagaaagttgggtttggtaaactcgcaaaggagtattttaagaggttggtgggaataaaggatacagagttcacattccattacgcatatttgatggtgagagtgacccagaagatgtcgcttgagagttcaatcacaatcggctcctcactgaacattttcttgtcttctggaatttcagtagttaacaagtctatgcagaatttggtcatattcccaacagtaaaaccacccaagaataaaatgacattcaaggaggaaattctgaaaattgaaatagaaacacctcagattccagaaaccccaattgataaatcatactttagggatgaaaagttctctgaaattgataagatttttaagcccatttcagcactaacggaacacaaactagttaaaattgtatacccatctccagtgtgtgttaatacgtcgaattcccgtgatacagcttttgtcccagaccatgagtccaataatcgggtaaccgatcaatacatactattgagggggaacatgggtgaggcgagcagagtgtttataccgttgacttggatactacacggcaataacacaatatgtgtttcactgttgactgactttgacactgcatacgggaacttcgaagtggattcatttagtccatctgagagctcatttgctcaaagttcttcagtggaatctgggatatactgtgatgtactactgagtaaggaggctagtttgcacattatatcatcgtttgagggtcataagataaaggttccagtacctggatttcaaccaacactacatttggggcagtcgttaattatatccggcgattctggttctggcagtaatgatatgatgccagatgggtttccagcccacaacattagtaacccgtttatgggtttggcacacctttcgagtgggtctggagatcagaatgcattaaactcaggctcaaatgcattgacggatggtagaggactgaaggaatctgaggagtttccattggtcttgtcgtcaacactaactgaattcacaagtgtgcacaagactcagataccactgaacccaatgaagcatctgattaaacgctacgaagtgattatagagtcctgccagattatagagaacatgctcccatacgacattgatattttggttccagagctttactctgcactttctgattcctctttgtaccctcacaatgataaacttccgacccataaatcactaagctttgatcatctggacgatgaggatattcaggaggatgagaggcaggactcggttctaattcctaggtcaatcagtgcttcaacagtacacctaatcggttatggctcaaattcccagcttttgccttcatccatgaatagaagtcttatgagtgaaccctttagaccggataaagcatctccattggatcatggattagagtacaacaggcttgactttatatctgacaagagacacttgccgataaagtcaggaacgagtgttcatttggagacatacatgaaaagggcgcgaattttctttaagaactactgtagccacgagatgcagttcaagaatgagaaccttacgacatccttgacgtttgaaagtatgagtagtcaggttctggaaaactttaaccagtttttaggcctagatacgggaggtaagcccattgggttgcctaagagtttgaccatatctgttgaaatttccagaaagacaacccagccatccaaagacaagagtggagtgataaggcgttatttggcttcctcacagattgtgtgtaacatttttgtggataagtgggtggttaactggcttgagtacccgattttgttctctcgcgctgatggaagatacttccagtgttttggaggcaaatcctgctctttggtgtcccaagatctatcgaatacaggtttacaccttgtgattaggaagagttacttgaaaatgatccatggatattccatgtatcccacaaaccctcgcacgagaccaattttcaggataacatcaccagatcatcttatcagtgacaagtttatggtccctgatctgacgttcagcccttgctcgatcaaggataacagagattatccaaatctgcattacttggtggcaacctcaatatcaccctcgcccttcttcaggactgtggtgattgaggttcttcctcaggtaacagtcacgaaccactttgaccttgatatctggattcgagagttcataacgactaaaaacgttgtcaaaaacgtgatcaagaggacgggagtcattcataaggtctacaccaacgtcaagcttctttcgcacaagttacacacaaacaaggttaaccttgacgccaggagttcgaaaggtagtcgtaagagccgaaagagtaaccgtagtaggaggtcacgtaggactaaagataccgctggattagggttttccgatgataacacggggcattggataaagattgatagtggtatgacagtggagtttcaccctcagagtaagggtgaatttcacgttcaagtcactggtatcaacccgttccaatttggagatacaaggatttcaaagttctggtcctcgtcgctcctaattaagccttcgtcttccactcagttccgttatccacagatgatccagaagtctgacctccaagttacgacccctactgcctctagcccaacacaaagaattgacagtaacatggtaaagtatggactatgtgagcttgaaacactagtgcataaaggctgtaagatggtgaggttctcaagacctaccaagcctgagtgggtgattataaactcaactggacttaatctttacattcagcagcttggcatactatcccatggagaaatcctgtgcccgacacatgatcttgggggtagttacaagactcaacgtgacggctttaaagaagtaccggaacccgaaatacaaaccggagctgaatacagctggtacgacccgctcaaggaacagaaactaatcatcaaactttaccatatacaatacaaaaataatgatctcattggtcgaatcatcaaaaacaacaaccccaatactgataacactgttaatagggataatagtagccctaatggcgatggtatgggagttgagtttgagaaggtgtcagttagggtgagaggagtgttattgatagatttgggaagagtggaaagtataaacgtgagtgggatatttaacataaggttggggaagatgcggttggcggctaaggttaacgcccagacgagtgtgattatgggtcagcgggctttaataatcacttgtgggaaactgaacaagctaattaataggaacaagaagctgtttgatatctataaacagattaagataccaaacgcagagattaaacttaacccgaagcagtacctgctagaaaagttcaagtacaacatcaagcacgctgaaaatcagaggggaattagagtctcaaatcgtttaaccactaatacatacccattaaccgggagaattaattctaagtctagttcaaggacaatttccaaagttaacactgaccgttcctcatctaccaaactgtcatcacaggttaaacctgatcctaacattgttggaagtctcaagccagattctaagactatttccattatgtcagattcaaagagtgtgaaaacattgtatttacatcatacaacgatgggaaagagtgaatatcaaactcgggatgtgaatcaacgtcgtacgtatccactgacgagtccgatttacgacacaacttaccgagagaaacaggttctaattaacatcagcaacgattacaccttgaacgtgtccctgaacgggtttggactatgcatatgctcgtatttgccagaggaactgctatatttctcacttgtcctggtcaagtttagcacctgcttccaggacaatgagaccaggaacctgttctcaatagggtggcttcaatccgatgtacacgacatcgattcattctacccaaccatgctcaaacctgttctcaactattcaaccttcaatatcggtaataacaatagctatcacttatttagtaccaacttctttatttacaaatttaatttctatacctagtatactattacaacataatcaatttgtataaagaaatgtataggaagtataaatagaaggaaggcatcgtcatacgtacaccatgatataataactaacaataataaagaggtggtaagtattatcatgaacacaaagagtaacaagtatataaaggaaatatcgttgttgagcatagatatacagccgataaacataaatcttgatactcggttgatattttcagctctgttgctgttggacgagtatttgtcgattttctcgcagtctgagaggaacatggagtcgttttcaggccctctggtgggaatttttaactacgagaacatggagtcatttgacgatgaggtgtacattctgaacgacgtcgtgaagtctcagtatggctcagactcctctacaggttcccgttacaacatttcacgcttcctaattggaaagattgtaatggttattaacctaaggaggtcagataatatcctaacagacgaactaccacctctcagcccaatggttcggtacctggtttacattctcaggaggacgccgcacatctcagatgcacacattgtgctcaataaggagtcactaatgagactctgctgtactccgtacgtgctcatgtcgcacttcacatcaaggtacatgagtcaggcaattcatcaaatttacaaagtgctctgggcagttgacctgattgggaacccgaagcttattttcaatcattggttctcagctctttaccagtcgttaattgtaagtttaagttgtaataattgtttttaggactttagagaggctatgaggtttattcacttgccgcccgtgacgtttttgctactcctcaagggagtgagccagtttggagtcacggtcatctcaggcattgtggacgcattttacaggctcacaggaagctggtccttgatactcaataccgtggcacttaactcagatcgctacgcagttttcattctcaatcaagtgttccccaaaaacctctctcatcccagtaacctcctagagggttttgtctttggaaccagtactatgggaaggaatttatacatatcactaggtatcagctgagtaaatttcttatacaactactatacttagttttgcacgctcttatcacttatcaattatatttaaatttatatctaatgtttgtgtagggaattttatatttaagccagtgaacagctttaataagtttgttgagtcgataaagttgaagaccgggaagagagaaatcttaatgtcatttttgcatatttggacctcaatcttttcagccctttcaagtttgtttttcggaacattttctgcgattctttctggtgtgtcgatatggctgcaaggggttctgaaccagatgcactcagtgcatatgctttcggccataaggccaagacgttcttatcaccaccttaagtgcagtggccctgtgcggtataactttctagagtcgtggtcagttgaggcttcaaagaggttcggtcactcgagccaggtgctcttggcactcccactcgacgtcaagctcaagcttttcgacccagtttacctggcaacctctcactggtcagtattggccacccacatcagctccataagtcccctgatcctcagccagtcatttggcagctttaaggacctgatctgggttgacaggctagacctggggtatgtagagaaacgtcacgtcaagtggaagtataaaatcaactcaatcaaaaggatacaactaatacaactcttttgttatagtagtcatgacgtggatgtcccaactttcagccctaatcacgttaacaataggggtgaaaatgccgatagaactgaaagtagtaatagaaaagtagagggccaagttagtataataatatatgatactgatgatgaaagcagcttggatgatttcagaagtaactacttgaacctagcaccagatagtagaataatactacccttgaaggttggaaagaagatgattgggaagacgatgtattttatgagaattatattttcagaggctggacgagtaggccagttcaattttaacaagaaactgcctgcaaaagttcaggatatgcttgaaaatccaaactttcttcacgattaccaggttgaccagtccaacgttcatgagcagattcagatgaacttgggtgaaattaggagaaaactggagaaaaaatcatcagctgggaatcaaatggatttggtgaacgggggagaaaagttaaaagaaacaacaattggaccagattatattagaactggttacctggatatggaaatggagatgagtaagagtttgaagagagtggagccctgtttggaaatgtacaaagtcggaaagggcttggaaattccaacagttgatgaatatttgaaacaaaagatcgaattcacagatgttgatctaggcgaaagggatttcatgaaagccaaactcccaaatgctgaaggcgatgcgaatagtgtaccatatgtaaaggatagtgtaccatatgtaaaggatagtgtaggcgataaagataagaataatataatgtacaatagcgtagctggaaaagctgaaaatgtgattaataagagtgtgaagaataagtatggattgaaggatagtaaagaggaggatgaaattgttgaaattgtaagaatgccaaatttagaaacaggcaaattgtattttacgcttttgacctcagttataagagaggtcgcgctttaatttattagaaatctttacatggggatccacttacatacatttcaacttttctatctaatctcagactaatctagtaaatattttaaaaatagaattttttttcaaatagcttaaattgaataaaaattaaaattttaatataaatagaaattgtgatataaatagaaagttgtaagatagatagagcctgtaatacaaactaaaagtagtgaaataaataaaggaaattttaaataaattatgaataaagagtgaaatggatccgaatagtaatttagagagtaaattgtggctaaattcaccaggaacagctgctaggaatgaaggatatccaactaatgaatttaaaggcttgacactctctgatcctactgacctcccgctttcagctgatattgttcctctcaaaatttcaaatgggcctcaagatgaggtcggttccgacgagtttgatgttatggtcaacgacctcagaagcatcttcatttgctggctcaagaagacacagaacagcctcaaatcgcagcgcgaaaacctcatccgagaagcagatgaattacaaaaggagaaaaatgcatttgttcaaaaaattaaacaggaaagagcaatagaagctgagaaattagctgtaagtccttacataacttttttgtatacttatttacactattaatcttgtaaatatagtatttaactgataattcagtggttatgtgtattttaacctagttatatacccataatttactaaaattccccaattaatcattaatttgttacctaatacattgtttaatcgatgtttaggaggacagaaggagacagaatgcagagatagctagccagttgaaacagatacaaatagaaagagaggactcaaggagaagaattgaggatgactggtgcaaattggagcatgagaaggacgtgtttaggaagtacatgcagctggaggccgagaagctgaagcagagaattgagttgctagaacaagagaagagaaaggttgtggatagtaaaatagcctccgagacgatggtcgacattaacgtaggaggcgtcgtctttgaaacctcaaggcacacactgactcgccaggagaacagttacctcaacggactcctgagtggaagatacgaagtcggaagagatcgccaaggaagaatcttcctggacagagactacgaactgtttagaatcatactcaactttttgagaaatccaacatctcttccaattccaaggtaaactattaaccctatttctttttacacttatttacaattattaccaaatcatagtattaattgttgtttagggacctgacggaaagtgcaatgatattggaggaggcaaagtactataaagtaaaattcagcccatacccgttggtgttgtgttacggaggacataacgggaaggaacacctgcgttcaatggaattgcttgatatggacagtaaggtttggagaaattgtaacccgatggccaccgaacgtatgtactttggatctggagttttgaacaactttttgtacgtttttggaggccaaaatcttgactacaaggctctctgtgatgtagaaatgtatgaccgcttgagggacacatggcagcccgcggcatccttgaagcaacccaggcgtaacaatgcaggcgctgctctagacgaccgccttttctgtgttggagggtttgacggtatgactattttggactcagttgaatcatacgatatgcgcatgaagaactggataccagttgcctctctcaatatgccccgttcctcggctatggtcacacatcaaaacggatcattatatgccattggaggtacaactggagaacgcctaaagtcagtggaaagatatgacgtaaggaaaaatgaatgggaactcataagcaatggattgcttgaggttaggtcagctggggctgcatgcacctacctcaatgagatgttcatcgccggtggaattgacaaccttcagtctgtacactcatctgtagagacctgggactcgaagaatcaaaccagttcgtttcttaaggatgtgcctgtcccagtcatggactgtgctatggcttcaactcctcacaatattgtccttgttggtggacaaaataataagattctcgactctacattcttctatcaaccagaatctgatcaatggactccaggtttgtcttcaggcaattgtttttatcctctatctgggacgtgattttacatattttactcattccccgatacagttatatatttactagttaacaatgtataaccctcaaatactaatcaatttatggattaataattaatataggaccaaagctgataatgccgagatatggtcattcagttaccgttcttgacttttaatgtaaaataaacatttttcacactattacatcttcacaatattacaacttcacaattttaattttaataccactttatacgttattagttttattttagtatggaagaccatatttataatttttaaagtaatttttaaagttttgtaaaaaatattttaagttagttcgagttgcgcagttgagttcaagctgtgtgatggattttaatggaagatttaatttgagagacattttggtataatcagccaaattaatgatggaagattataggaaatatttaagggaagccttaaatagaagatatgaagggaaattccagcccttccaaaaaacaacaatctcctcactgaccacttctgacccatccaataacgaacgggaagtagaaccgaaacgaccaaaatataatgcagataaaaaagttggtggagatggaaaaagtatccattcaggcatgaccaacggtgtaaacaataatacaggtgtatatatagaagaatatgaaatgaagtcttttaaagaaagtggattgaagcttattaggaattgcgaagtttccttagtgattttggcaggagggttatctacccgcatgggcagctgtgagcctaaatccttgattccagtgaccgttgtcaagggaaagtgtttactacaattacaccttgagaaggttgttacactttttaggtcttcgggggctgatcctcacccatacattttcattcttacctgcagcttcaattacccccaaattcttacatttttgaaaaaaaatagctttttttcgctagactcctctcgggtggtattgctgctccagtcgaatttaccctgctttattggagaggatttagctttttcagagtacccgaagtcgtgcctcagtagccccaaatctgacttcattgacttttcccaaagagctgattttgataatttttacaccagaggtttcaggatggacgttcaatttgaaggacttgtaacttccccaaacggcaatggcgatgtttttaagtcactccatctgagttcagagtttatggatatacttcccaagctcaagtgcttgcacgtaattagtgttgacaactcgctaagcaagcctttggaccctgaattcataggcttgcaggtccatttgccctatttcgaaatgctaaacaagtgcatattgagaaaagatggtgagagtctaggagtgttttgtgttaaagattatccccaaattattgagtatacagagataaataatgttttacaaacatacaacggtgatttatcgaataactcagccgatacctcagtaaatcagtttgtacttggtaacatgtgtgatcatttattttctggtaaattcataactaaagtgctggaaaagaagttgtatgaggaaatgccatttcacgctgcaaaaaagagaattccttactggtgtaatgaaactttaaagttcctgttcccagacaaacctaacggttacaaactcgagcttttcatcttcgatattatgcagttcacaaataacgtgatggtacaaattctacacaattatttactagtcctatttagaagttatatataccaataacagtgttttagtgcgttttggtggatagagatgatagctttgcgcctttgaagagttcgtgggactatgatttgagtaatgatgaggccatacaatacaggatggataaagtgtttaaaaaatggttatgtaagttcaattgtacggttctagggctcttagaactgtctccaactctctcctatgagggagaaaatttacagaaatttaaagatcaaacacttaaagggccaatataccttgactaatatacaataatccaacttatatattgttttgtactaatatgtagtaaattattatacacaaaaccaatatagactaataaaaactaaattagaacaaaatatataatgggacgaagaaattatttcctttgttttggtatgaaattttcataataaagggaaccgtcaggtaggtgaacaggatgcctgacgctcttgggctggaagaagatgttgtcgaagtataaacgtctgtggttctcgtcaaccaaatcaaggatctggcccttcttaaggttgtgctctttgatgtagttaggatcacagtggacgacgaaccttggctccctagggtcatcgccctcaaccacgacgtcgtccgtcttgggatcaaaaggaagaacattctcctttagctctacaatagtgccgttggaatgacagtatatcaaatcgcaaagaaactccttctcgtagtcgatcttcttgtcagggttctcctcgttgtacttatcaataagctttctggcatcacagggaaggttgggagagccgtaaaacgggtggaaccagtatttgtatctgtattctcccaaatatctaggattcctgaaaatgtcaccctcatcacaaacgtcatccaaataaggcaatttcaataccacataaccaaaattgtcaataatgtcctctaatccattaattaataaataaatagatcagtatttaagggttatatagtttaaatagtatatataactggaaaaataagtaaaagtaattcccggggataatgaagtaattgcattcaagaaacacagtacttgggaaagttttgttaattaattgtttgatagaagggtccttaatcgattgatccaaaggaattttaaaggataccccgtcattgtcaacagtctcgaaaaggtcttcaaatttctgtatcctttcatccttttcaaaggttttaagctgacttataggaacgcgtttcggctccttagtccgacttgtaaggccaaatccggaacctttacctatactgccgccaggaggaacaactttacccataataggagtgggaggtgagtctgactctccggtgattttaaagggggtggcaagtctactgtagtaaccacaactcctggcatccataatttccaaaagcctgtccataggatagggcctgcaaaaacggtcataaaccctgtttccaggaacataaaagtttaaattttcctcttgacccttatttggagaagtaatgtagttgttgctgtcggaagaggaaatttgacctttatttaggggtttaaacctgaagcctataaatttaagcataggggttggattaaagggtatttcttccctcatgtttagtacagttttatagggtgtgatagaattgaggtcaacgaggggggaaacaggaagcctcatgagctgtaaattacagcgagagttcctgaaattgatcttccgaatgtccacaaaacggtcattaaacctcttccgcctttctttgacccttctaaacagttccacctccttattaaacctgtttattttgctgcgttttctcattaataaggcaaaatctcgatacttattcacaccattgttgatccatgttaaagaataatttaacggggttttagaaataattttataatcaaattcaccaattttgggaataacttgatgtctaatttgagaataaatattaacaaatgaaggttttaagtgtgtataattaattgcattggtgaaaaaatgcgtagaacctaaaaatagaatagaataagtgaaaactaaccatttctgctgcgataaagggggaatatggtacagaaacccagaaaataaaccaaaaagcaaattttataattgtgaatcgacacaattgacattacatttaaaatcccatcacatcatccaaatttacctgaatctaaccaaattaaatattactaagggggtattagtgaataaaatgaaattactggagaaatgagaagaaaaaaggtacatttgtaaagaataaatgtgagaatatggaaaatgcgaacacatatggaagattccagaaatttccaaagatttaaacaattaatttaaaaatatattacaaaaaataagggaaataaccataataatcgagataaattggtattttgtagggtccgagaaatcatagtatggattatttctttagttgaagtttttatgagatttgtggattttttctgaaaaatagactcttttacatgattttgtacattatttccctaaattttgctcataatttttctctaatgtatctcgttggtgaacttttaattttttattttaacacgtatcgcatttcaaaaacaaatgagcagttgcaacaaaaagtaatcttaaattttttaatttaatttttttcaaaaaattcaatttaaatatccagaaatatagaatatattataaaatacagtataaataacgcaaaaatagctcatttgtgtaaactaactcttaaaggactaaagagaaacgaaagatttgattgtaaaataatgaaataaatgggtgatgaaaaggaatacttcggatacatttcaggttatgatccaggaggttctgttgagaaagttgagtttaatgacataacatttgatccgggaaatgatgaaataaagcgtttgcaagatatcaacaagaattttccagtaaataacagtttatactacgatgatcacttagatggaaatattatatataatgatgggtttccatcctatcgtatggttagtactaattctggtaataacttgaatagtttttcaaggaatttaccgaatgaaggtattaataataacatagctaataatagaatgatagtaaatacggactcttcaggatcaagtagtagtaacggtagtgaaaattttgtgaatagatcagcgaacgatatgaatgggatagccgaagctataaaggaattaacctcaagattgcccatgcccccatctcctgaccttttaaaatctgtacatccggaacttgcagttaaactacagttaacatatcttaaggcatacatacagaaccaacaactcctaatggatctgacccattccaacacacataatatgcatagtagtagtgtacataccggtaatggtttggatatacctaactttggtaataatttgggttctaattctcaatattcctatcccattgttgaaattaaatcttcgtatccccaactcaccaatacattcactaataacttttatacccagactcaaaatcccgttgatttatctactggccgtccagacccttcagagatgatacaattgaacaataccgtaacaagtaaacaaacaaacactgcaaattcagtgctaaacaacggtgtggaggagtttggacaaaataatggatatttgcagcttacaaattatccacaatttgcaaattacccaaatttctactaccaacccacgaatcaactcagtactcagctggcaacatatcctcagttacccaattatccgcaacttacaaattaccctcagttggctaattatccacagtggacgaattacccgcaattaacaaattatccgcatataactgagagcgggtcttacgattactcaaacagatctttggataaggctggagagtttgggtatgacggatttaagtatgaaaacccggcggatctggtaccaactgagtatcgagaccgcgttaagtacaattcggccaaaaaatcattcgtttctgtgtatttgaactcacttggcctgagaaagaggaagtcattttcaatcaacaaatttgggataaaaaaggccctcaagctggccattaactttgccaactcccttactaccggtgacaaggcctacagtaatgggctgggtcaggatatgacgagcgggagtccacgtgacgacgctgtggatgacggggtaaaactggccataagagaaagaaacctgattgaggatgtgtgtgagcaggtgttgaagacgagtgagggaagtgtggagagttttgagggatttgagagggcgcttggaatggccaggatacgagggctggtgtacagcctcggagcgaacgtttggatgtgcatattctacaaaaaacggaagcggaagctccagttcttcagtgtggacgagttcgggtttgaaaaggccttccaaatgggccaaaacttcttcaacactaaccctcaactggtacgctcaaaactctcaggagctatttcatactggttagaatctaatccttccaaaactctcaatgtaattttcaaaatcaagcctaataactgtaatctcagtgtcacaggtattattttaccatttcaaataactagttatacattagttacactaattacatacctaaatgtactttgactattaaatcttttgcatatgtcttgtagatatttcaaacggtgtggaaaatggagcaaatagtaacatggaggatagagaagtgttatatgttggaagattcgagattgaagtttatggaagctttctacaggccaaaagagcctcacagacttggtgtaatcaagtaaaaaagttccattcatccacaccactgcataacactcaaaatataaatacaggcaatagtctgagtgatagtataaacaaattagggtatgtgtattatagcgacaatgataaaaagtgggtagtggtgagcgagaatgggaagatagagttctcagtagagaatttgggacattcagaggccaaaaaacaagccatttcacttagatataaaaatatttctaactaatatggtacttcgtagttgatattattcataataagaagtggtaaaatgtggtcgtttggcttcaaataaatcttggaaaaatgattttaataggtgtgtaaaaatcgcttaattttgagagaaaatggtgagtgaatggaataggaacacccaacatgaagaatggattcgttatgaatgcccccaccaggaggaataatagatggttacaatttcttttattttcagttacgactcaaatttacaatggcatcattgtttctaacagttattccttctggcaatgtgatgtgtggcgtaattcgccccaaaaagtctgtggaagactctaacacagattcttccagtttatccggtcaggattccacccatttcagcaacacaactgatgtagaagctgagaccgggcttgagggtacccagaatgaaggtgttgaaccagaaatactattctgtgaactcaaaaacttcgtgttttatgacggggatatgaaaatggttgatccctctagataccacgtagaattcctagatatcctatttgtattcctcttcaattgtttccttggcaaaattgactacggaacagagaccatctggaacataaaagattatcctattccgataattgtggcttctttgactgtagaaccattctcgaaccatttcgttctcaagtgccaggaagatttaaagttgacaatcccctatccttttaccaatttccccgatcttaaggaactccaggagcaatcaaccgaggagcaatcaaccgaagaagaaataaccgaggaagaaataaccgaggaagaaataaccgaggaagaaataaccgaggaagaagaaatcgaagagcatgaaacaagtgaggaagaagagtaatctgataaatactattgaacaatgaagagaaaagaataacagattctgatttaaaatggttaagataatatgtatttttaacaccctgagtcattaacttttgtttggggcctaaacttttcgtaaccctaaaatgaagataaaacaactcttgtatcacgatttaacaattactgaagatcgtccccttgaatacaaacttccataacacttgtcggataattaccagctttctctaatattgtactatagaatacatatttaatattacaaacatgtattttatattcttgtgtgtaatcgatgtgtaagctaggatctaataattccccagtttatttttattttatagttaattgacaaaaggtgtaacggattattcaaaatgtcaaccattgtttcaaagaaggattcaattaaaacagaatcgtcatacaaaaacgacccaaccaagactgacctgtcaaccaagagtgacacatcaaccaagagtgacagggaaataaagagtgacctgtcaataaaaactaatagcgaaataaagagagaccttgtgagttgggaaaatattgaactggatattaaaacagaagagagtacagatcaatttggatattttattaaaggaaaagtaaaatgttatagttcaagaaatcttaggaagtttgtaagaattagtgaatcaggagagacttgcgaactgatttgggagtcaaagtctgataaagaagagactatactagtaattgtgtatgaagaaggaaccaaaaaatggcttgctctcaacgtcaatggtgggtttttgttatttcacagaactgggaaaggccaggcctggaatgacattaccagaacaggcgatgacttaactaacgtgaaattctttggggaagatagaaaggaaggagaaatgctcaactgtaagctatctttggaagtgactgaccacatcattattctattttcacctcctcgtacaattgcttacggctctgcacccatttggataagaaacaaaaatacaattagtgaaaattttcagaagaacgagattcccagactgttgcttttaaacattggaggcaataccttatatgtcacgtttgatgttttgaagcccgcgaactcggaggttaagtttgagcgtaacgttgttaaggaagaggttgtcccagtcaataacacttatgtaccacattcccttaagcacatgtttgacaatagttttgtcaaatatttaaggaatcctgaagactgcgttaaacaagatcaaagcctgccaaaacccgctgaagtagttgaagtagatcacgatctaattgtaataaatccagacaaaccagatataccaatcaagaatcctgtcgtactagacgtggttgaagttgagagcgacgacgattgttatttcgatggatattctcctaaagtaaaactcgatgttgatccgagccaaaggttatccaaaagaataaaaaatgatcaagttctagatagggctaataggcccggagggctttctgcatatgcgacatatcaggatcctgaaccggaacccaaaagacaacaagttgaaaatcagtcagtaagacacgaagagcccagaacattcgaacggtcaaataccagaacagaaactagacacgactattcaaatacagtagcacaaatctttaggaccctttcaaaaaccttaacacaactctttcaaaccactacaaataccttgacacatatggagaattggtcaccaagacagcaggagtacataatacccgaaccgccagctaccaatcaacaaatcgaagtaaaccagccttataatacaagtacacgggtcaatgtaaaccaaccttataatacaagcacacgattcaatttagacccatcgaatccaacaagaacaactacacgggttaatttataccaaccttataacacaagtacacgggttaatttaaatccatcaaatccaacaagaacaagtacacgggttaatttaaatccatcaaatccaacaagaacaagcacacgggttaatataaaccaaccaactactactagaacaagtacacgggttagtgtaaaccaaccaacaagaacaaggacaatcactaatacaccctcaactggtataagggcaatatgtgatggacgttcaactggtataagggcaatatgtgatggacgttcaactggtataagagcaatatgtgatggacgttcaactggtataagagcaatatgtgatggacgttcaaatgctctgagagcagttggaacttgctcaggaaaactccaaaacttcgtatcacccaaaactacaaatattaaaacacaaactaaatacgagtacacaaagacgattaaaacacaagttaaatacgaatgtactaaaacaattaaaacgcaaatcattaaaaatgactattcggatgttaaaacacaaatcatcaagaacgagtattcacaaactaccaaaatgcaagtcaaaaccgattattcaaataccctaactcaaatcaaaaacgacccttcaagaagtaccaagggggtaatttgtatagacccgtaaatatctgtaaatatgtaaatttatacgaacgaatgtactcgtatatatataaacatgtgtgtaattcatgtaagtgatgaagagattaatcggtagcatcaattactggttctcctttaagaatatcatcattggcctcagctctgtattgattaaagtttttgataaactttttagcaacaagtttgacttgatcgaggtgttcctgtgagtcttcccagcttagttcctgacgcagaacttccttaggaactccggtaacctcctttggaaccagaaatccaaagtaaggaaaaagctcaaagtcatcctgggactcgctaatttcacctctgttgatcgcatccacaatccgtctggagtatctgagtgggattctcattcccttgtctgactcggaactgcctccaatccaaccagtattcaacaaccaaaccctcacggagccctttacattggtggagcctgtggaagtcagtttttcgtagaggagattggcgtaggttaggggagaaagggccagaaagggacctgcgtaacaggctgaaaaggttgcagttggttttgtgactccgatttcagtgccaaccatcttcgttgtgtaacctgagacgaagtggtaaatggcctggtggacattcagaagacttactggaggcagagctccaaatgcgtcacatgtgaggaaaatgatgttgtttggatgtctctggacaagtgcaggcaaacatacgttgcgaatatgacggagagggtatgcgcagcgtgtgttttctgtgacactcacgtcggcatagtcaaccaccttagaagagtcgagaactacattttctaggactgaaccgaagcgaacggcctcgaagatctcaggctctcgctcagcgctgaggtccttacacttggcataacagcctccctctacgttgaatacaccttccggagtccaaacgtgttcgtcgtcccccacaagctgtcgacctggctcagttgacagagtagtcttaccagtcccacttagtccgaaaaacagagtgacgtttccttcagagtcaacattacacgaagagtgtaacggtaacaaccccttctggggcaacaggtacatcatcagtgtcaacacgcccttcttcatctcacctgcatactcggttcccaatatcaccatctccatgcttgtgtaatttatacatatcgaggtgccactggttattcctataccattttataatcaaactaatattaagtatacaaaatactaatgaataataaatatataacttgtaagtatataatatgtaaatattggtagttgtgtgtacctttgatggtggtgtcagcttgatgtgggccagcgttgtagatagtgaagtcgggggtaaaatttgcgagctcctcttgagtggggacgatgagtaggttgtgcatgaaaatggcgtgataagctctaacgctaaccactcgcaccttcacacggtggtcgggatcccagcccgcaaaggcgtcggtaacatagatgcgctctgtgctgttaatgaagtcaattgctcggcggcggacagaatcaaaggcctcaggctcaattggaatgttcactgaatcccaccaaaccttgtcacgggtgttatcatccaacactgtcctcttgtccatcggagatctaccagtcttctctcctacattccaatataacaatagtatatagatagtatattatacagtattttagtagattaaatatacacatgtgtagtatagcgataattattacctgataaacaagagagggctccggtggaagtcaattcggtatgtggctcgaatcttagagcgtggtggtatagtaaagggatgcaactattatgcaatatcttagcctcatccaactctccctaaaacaatatgaccatatgctaatggtataatctaaccttaactgtataatatacagataactatatagtaaataggagaaaatacccagtagtagtcaatagtatataactacatactactaatattaactatatcaaatagtattgagaaatattaggaaagatacgaatttcttaggcttggctagtaattgagtcgtcgtatgctcaatggcaatagtattactattggtgacgggaagatcattgaccttctcgagaagaatgttatggtgaggcaaagtgctcttgactgtaactttagccatttcgatgtgtgggataaaattcagtcttccaaatttgaaattgttttacttaatattttgaagtactatagagtaaattagaaccagaaaaggatgtggaaatgcgaattttcatagatctttgaccaaatcaaagcttataagaacagaagcaaaagtatagtgcatgtgttcagattatatataaacttgtcattgagctcttttgtgaacattttacgatattttattagcagaatcagccaaaaaagtgattatgctaaacaacggttttgtgactttttttgaaaaaaattgcataaactacaaatttaagataaattagcattaatttgatacaattattaataaacaataaataataagggggaatgtggctgtgattggggtattagcatatgggtggcagatcgggcctgggagtccataaaggtgttgatttttgaaacaaaactttaaaaaaatctccaaaacataatattttgagtttttaaaatttatttgacctaatttgaattttttaggaattttttaaaaaaaatcaattttcctaacactatacttaccatccttatttattacttaaataccttatatattatatattagatctaagatagttttaaaatgtgtgttaaaacttaaatatgttggattctatgagtttggagagtaatttccacggcttgagaagtttctggaaggtttccgggaaatctaatttgaagcgcataactcgtgaaatttacttcagaactgatcttggctgtggagttggctcttgtaatatttgtcctaattcactctcacaaagtactgcttctactcatttttattcataatatcacataactactgattaacgattgattaggaaaattaaactccgaatcacccataataatacttacatttgagataataagtaataattttctggttttggaagaatttttgaaaaactgtgtgattccagtgactgtccttaatgagataaggcgtagatccctaacacagtacaacaggcttaagaaattagtgaagaattctgaccgaactttttacgtcttctcaaatgagaacttcagggacacgttcgtggaagaattacctggtgaaagtgtcagtgaaagggaccaaagagccattttacagtgtgcttattggtattccaatcatttaccaaatttacaaattctattcctaacgagtttccttttacttatttttatactgttaactttatttagtacatagtaatacaatggtatatatatatatatagacggagaagatgttgtgatggatcgtcctgagaatttgagtataattaacctatatcagctttacgacatgtttcctaatgattatgaaggtattttggaacgtttgccacccaagccactccaaactacttctaatgctgagaaaggggtttaccctcctcacctaactgagtctgaggtgagggctggattagacgctggatccctattttccggtactttacacatgtatattggctcctaccaacgtggttatgtttcatgtggtaatcacgaatttaaagttaactcactaattcatctaaatcgagccctagatggtgatcaagtcatcgttcaactcattgatactcctacggattttgttaatactggtaatatggataacgctgttgacggcattagtcctaattcaaggttggatggtgttgttttggaggaacaaattgggactgaaaatgatgatagtaatctaatagacggttatctagagcctgaacagtataaagttataaaacgttactgtaaaatagtgtcaatagtaactagaatgagaaaggagttttgtggaagtttacttccagttgagggagaagttggcgatgggtatgtacaacgactttttgtgccagtagacgctagaattcccttcatttccatcgaaactcgccgttcaaaggatcttgaaaacaacagaatcgtggtcgaggttgattcttgggacagattctccaaacgcccaaatggacactggactgagattctaggaccaattgacgatagagacgtcgaatctaatgtgattctcagggaacatcaagtaataacagaagatttttcacttcaaagttacaaggatttggccatagttacaagttcgttagttgatactaataatacaggtaccttttcattcaccaaattccttactattaagaatactattgttaagggttaatatttaagaatattataattatgagttaaaattgatgtagaaaaagatgaggataggagcgatataagaataactcctgaattgctaaagggcagaatagattaccgtgatgaggtggttttaagtgtggatccacctggttgtaaggatatcgatgacgccttgggttgtaagagactttcaaacgggaactttgaggtctcagttcatatcgcagatgttacgcacttcgtacatgaaggctcaaacttagataaagaagcctcggaacgatgtactactgtttacctagtcgatcgcagaactgatatgttaccgaaactcctaaccactaatctttgttcattaatgtaagttttttatttgccaatagtttagccaattttagctataattatggtatatataggagttgatttggtaatttttaccgtatcatacaacagatataataatgttgtaggagtggtgttaataggttaaccttttctgtatattgggagatggaccctaatggagtgattctgggcacaaaattctcaaaatcgatcatcaaaagcaaacgttcacttacttatcaacaggcacaggaaatgatcgattcttcctccaagtattgtatactaacctatcgcacattcaatcagttataaactatatatttaacaaaattgttatattggtataaataacgatattagtgatgaagtgagtgtttcattgaggaatttgaacaatttatctaaaatcttgaggaaacaaagaatggatcgaggcgctgtggaattagaatcctctgaagtattgtcattcttatacccatatttgctaatttttataccgattttatcattagatagaccttattaatatattttaggtgaaatttgagtttgatatgagtaaagtaatgaatttggagtcatataaaacctacgaaacaaaccaaatggtagcaatgttactagtgtacacatgtgtaggtggaagagtttatgttacttgcaaacatatcagtggctactaaaatctttgaaaggtttcctaaattctctttattacgaattcacccacccccagttgaagagaaactcaacgagcttaatcgcactcttcaacagcaaaatattaattctttcaagtactccactactttcatcctattcctagaacacttttcaaaattttcattctgttccttcaaaatttacatattccttacattgtttattcagtaataatttgttgtcacgagttgacactaatatacttagttactacacaatcatatttatcatgatgtgttaatatttgttagatttggaaactctaagcagctgaacgagtcgttggaagtaattaaaagtcaaaagagtgacaagtttacaacagccaccaaaattttaaccactcgtactatgtcacaggttgattcaattcttttaaaactattcacccccattttaacacagtaataaatggtttaggccttgtataagaatagtaatgacttaaacgaagacgagtttaagcactatggactgtgttgtgagtactacacccatttcacatctcccattcggagatacgccgatgttatcgtccataggttgctggcctcagctcttgatctggctccaatcaaccacaatttcatccaatcagtacgatttaaacattaaagaattagttacatactaatcacaaagttacaaaatcactaatttttgtgttaataatttgtttagttaagtggacagtgtgatttactgaataaaaggcataggaatgcccaatggtgttcaagagaatctgataaaatgttctcatatctctacttcaagcaaatggttcaaaatcctcacgtttactaataatttatttagttatatacaattattagggtaattttaattattcatattcatttaatcatttagttatttcgttacattagtttaaatgctttattggagtggttaatgaatgaatcagggtgaagtcgagtgtaatgggatagttttggatataaatgaggacagagttgtggtactaacgttggagtatggaatagaggctgtggctaatgtggagttcaagtcctttgacaaagttaacaaggtcctcgtggacctctcgggtaaatcattaaaggtcttcgatcaagttaaagttaagatttacacctgcaataaacacttcagaaactccattaaagctaatatcctttaaccaactgctgatacactataactccacattaaagcgtatagtacacactataatattaataccactatatatatacttacagcacgtatttattaatatgcatatactaatgtaatatatacaaatatataaataatgtatattatataattgtgtgtaagattataattttaaaaaaagaataatcggatatttaataaggattggagcggttgtttgtggttttgtagttgacacgtagtttcttgcccatgatagtgaagccgttcatgttggccacggcctgagtcgcactttcagggttgtcgtaggagacgaaggcgtagcccttgctgcgattcgtgctccggtcaatggcgatgcgagcctggaccacacgaccaaagggactgaaagttctgaacaagtcgttgttattccactgaggtgggatgtgaaaaataaataatgaattgtcgccaccagagccagaattattattatagttattaccaccactgtgaccatagttgttgtagttgttgttgtgataattgttactattattgtgataattggagccactgtagtttgagttgaggtttaggaattcttttggcacttcccactgcgtagttccattatcaatgttgtaatagtagaatctgccgtcaggtgatatatattccttccatgggccagccatgcgggggtttccattgttgtagttgacatatccaaaattcttatcctttctgacatgtttctgggccgatggatttgagggaggatttgatggagggggatggttcatgcctgaagcgcggctgcgttttcgtcgagactcgaagtcctgagcctgaccactgaccccagttttattcatggcgaagcgaacctcaagtggacgtatggaaccttctagcattttcttgccatttagttcctttatggcgtataaagcctgctccttgtacttcatcttcacaaagccacagcctttattgccgccacaagttaagtcttttagcacaaacacctccaaaggttctccaaaatctttgaacaaagaggccaaatcatcttcagtaagtgatttgggaagagaacctacaaacaacttggcctcgtccatgcccggctcaccagccatctgagtaaagcctaagcgttcaacttcgccagttgcgtaacggatttgaacagctcctagtgaagagtcaataaccctctggttgtttaaacgtcttacggccgcatctgcctggcagattgaggccattttcacaaaggcacagttcttatgggagtttgtcactttgtcccttatcactatcacgtccttaactggcccaaactcctgaaacaaacgacgcaagtctgactcctcgtatgtttttgggattcttgccacaaataactttatgtcgacggcaggggctggagcacaaggcaggtctcctaactcatattctactggttcatcgtaatcaatttggtcataatcaggtggctcactgctgttaactggttctactgaatccattccattattatccatactgtttcccacactgttgtccataccattgtccatagcgttgtccatactgttattcatggtattctccagagtgttatcgatactattctcagtagtattagtgtcatctgtttgtatcgtgttagaatcagttgtgttggaggaatgagtggatttggagtcagtttgagaggagttgagttcggagagcatctgttcttcctgaatctcgtcaaaaacctcgtcctggttaccaacgggaacctcctcgaactcgttcggactgttcatagctataattttatcggattaaagatggaataatttaagttaactagagttaacaaatgttaacttaaattagctggaatgttgacgagaatcgagaaaggggaaaactaatgagtaaaattttcgtgaagatgagggaaatcttcggggaaaataaaaaatggtgtatttgtggtagaattaagaccctgaatggataaaatagggttgagtatagaaaataaaacgaaacggtactttttcggtgatatcgaattagtaaggtggtatagtgaaaatcgctaccgtttaatggaaggttctggagcgttgttagattttacctttggaagccaatgatggttctgaaggggaaaagaataaagagactcagagaactaattcaaaggcaaaaagagaaaaggatccgatgaaaggcatcagaatctttagagataaaaaggcattcaaataaaagtacaaatagacaaaaattcgagaaaagggagcgagaatttcataacataaccaacagtaaacgagagtcatggggatacgtaaaaaagggctggtgtaatgtggtctcgggttcgcccattagcaaggattcctaatttcaatagaagaatcgttcaataaaaaatatgagaaagataaaacggaggataaacgaaaaaaacacaccctgtaaggggtaggagacaaagcgcaggagtccccgaaaacatggcaatttaggggattaaatgactaaaaaagaaaaagcattttacaaaaaaggaaaaaatgagtaaatctgagcctcgaagaggctagaaacgatatttctcacattccacagccaaacccacaaaagtcgaaagccttaaatccagaaaaaacaccaccaaaatcaggcaaaaaactaataaataatatcacgatcataaatttataaaagatagaggacaaaactgagagatctaggaaaaagagaaggtgtgggaattaaaacagaagaaagagacagaaagagcggaatagtagaaatagagaatattaaaataaaataaattagaaaacgataagatagagtagagaaatttaaaatagtaggttatatttaaaataaaataaagtggtggatctgagtaaaatagagatggacagcataataggtattaaatcttaaattataataaataaagaggagtttgatattaacaaaaggttttaaataaaagtaaaaaataattctggtgaatttacctagacaatgcaccccctctccaagcccccatctcacattcttagattcacatcgaccgctatattatattaattccgctttatcactcaatgtgtagctgaattccgctgattcagacaccaaattgttgctcccaaacaccagcttccttaacacaaatccgccgttgccacccctcttgagcaggtgattctaccttttagctcaaaattggccatttttgaacttttataatttttgcccaaaaaatttgacactcgacaaccactctgttgctgcagttaacttcttttaactcactttattttttcgcttttcccccgtaattaaggacttaaagattaattttctgtataataactgcaagcaagatgatggtgtcgattccgccagatttcagtaatttcgataaatgattttgtcatcgcaaatcacctctaaactaattaataggcgaattttttgcaattcaaactctttttcaaatttttacaccaattccgctacctatcgtagtatatccaataataaaattgatggtttatccaatagtaaaattgataataatgatataaattatagcatcagattgaataaaatgttgtcaaaagtggtaaatcagcgcaatttaatgacgcaggcatgtgttttacacagcgttaagtcatcaatttcctcaactcttctctcaaattcttcactcaacactcaagatgagggtgctaacggcactgaaaactttgagaacgaagataaagatgacgttgatgaacgattgccaaggctttggcattatttaacgcaacctcaacccattccctcaactgctgttaataataataatgtgagtgataaaagtgttaaaaatgttaatagtaatgagaatttgagtttcagagtgatgagctttaatgccttagctcagagtttggtggatgacaagtatgtgcaaaatgacaagaggacgatgagttgggaccatcgtagagaggagattttgagagagatttcgcagtcgaattctgacattttgtgtttgcaggaaattgacgaacgtgactaccttgagtttttcaagccgaaaactgaagctttaggctacaattcagtctacaagcgtaaactccagaacaaacttgacgggattttaaccttgtttaggagccagagatacaagcttttactcaaaaacgagcttgaattctcttcacagagacctgacttcaataaacctcaggttgcaatagttctagctctagttgatctacactctactacttcagttggtgctaatactagtggcccagtagtaaaggggaatatggaaaatgattgtgtagaaaatccggaaacatctgataatactagtactaaaaaagttaatgagattagtgaatcagatgtgttgttggtaacgaatacgcatttgatattcaacaagagtagaggtgacattaaattgtaccaactgtgtaacttggttaagggcattcaaaagactattgagttcttaaattcatctcaaactgagaataagtttggtgaaccactggaacaaacctttagtttaggtgtaaaatcaacaatttcaaccactcaggactataaagattgggtatccagtcgtcttagaaatacagaaccttccgtggttatctgcggtgactttaacataacacctcaaagtctgatttacaacttaattttcaaggggtttgcacctctgaggaatagtaaccctagactactctctggtcaatatctaatgttcgacaacacttacctaactgcctcaacaggacataacgagtctggtgaaactctgggtaatgctaagcattacatttcagatatttactccactagtaacactagtaagaatgtggatagtcctaacaccgataacactgttactggcagtgctgataaaactgtggagagtagctctgtggaaaattcagtcactagtaaagattccaatgccgtggaaacgcctaagaccaataccagtggtaatatggatgacatagttgagaataccaataattggtatgaagagattggaatagatgaggagtttaaagtaaggccagatcacgtaagtttggaagctgaggaagatttcgttaatctcatacaatccaaatctgctgatttatcacaagaatttgccaacaaactttcattaaattctcttaacactagtagtgtaaatagtgttagcaacgacaacattggtagtggagatatggtttattgtccattgaagttatcgagtgcttatgcaatgggcgacagttttaactctgagccagcgtttactgcttttcacgggtggcagcgggggtgtgttgattacatctgttatgacccgagccttgttcagttggaagcgatttacgaaatgccacactattcacatgttagacgaaatggtgacttaccacacaaggtactgttttttcactgcttctattccttagctactaactagattttgcttaattatataattatgtatttgtcgtaacgagttatcacattttctatctacttatgtactattatattagttaatcatggtaataatgaaatgtgtagaaatggcctgcatcggaccactttagcctaatatcacagttcaagcgcatcaaatagtttaatctaatacacatctgatatacacttttaattaacattattaatatgatgtacgagtgtgagcacaaaattattgacttaaaaactgatgtaaaaggtgattaaattgcttggaagactgaagttctagcggaagagtgtatgaaaaggagctaatccccttgtgattgagaggtttgtttgagtggaaaggattcacgcgagtgtatgaagggttcatttccctagttaaagtgtgtaactcgtctgaaacgtaagtaatgtcagagaacaactcgcgggaaatctcagttagtttgtcaagtttctcagtgttgatagtcctagcacctggaccgaaatcagtgtcaacttttacatttttgaggatctcagactctaaaagaagaatgtttgatattttcccagtaatctcagacaggaagttagactgatccaaatccataaaataacggtaatttaggtagttgtgtaggtgtaatttttgagaaaaaattagtaatggaacatgcgtgatttgcggataaagtaagatttctttttatttcttgaacgtctagaatccgtgtaatcatcgactaagtagtcggaacctgaccccagctcatcctcacttaggtactcagaggaggtcaaactctcagattctacaattcaaattattcaaaattttagaagattaaaaattttaaaccccccaaatttttaaaaataatattttgtataatggattggaataaaatgtgtaaagagttaccgtaagtgtagtcactatcgtcgctgttatccccgaatttatccacaaattcgtcgagagtatattttatttccttcactaaaatatgaattataaagatgtgtaaaatcgtataaatagtagtagtagtaaggttactgtttgagagggagttgtttggaatgtaaatgattggattttcaataacttttttaagttcgttaacttcatttaaagttatcttccagcctggcttatacctgtaaacagatttgaatactataattcctcaccatataaacgcatataaccactccagtattatgtagcttgccattatctatattacacattttatagtttggaaataaactgtattataaggatattataggtaaaaatgactaattaggaccaaaatatagtgaagtaagtgttaaaaataccattcggatgaattttagaatgtaatcttgggtttcgggtgaaaagtagtcattaatttccaaatccagccagccattgaacaccttgtgtgtcaaagtttccaacatacatgaaattccaatgcctaaaacaatataaatcatatattaataaatataaaactatgtaaacaagtccatgagatagcagtagagtagtacatgtaagaactttccatctagaattggctgcgaattcgaaggaagtggcaataatgccgagaattacaaagattatgtaggtgcagtaggttttaaaattgttaataaactctaaaacagaaatgaactgtgaaataagaataaaaagtacctaaaatcctcctttggtattctttaacagtagttataatccttaaaacatcacccaaatcagattttatattatcaatccacattgttaagctaaaaaataatattttaaaccgtaatataaatgagtaataaagtggaaaatagagtaaactaagattaaaactaacttttcagccttgtttagttgttcattttgtttgctatttaaaatttcaaattgatccttgacattattgtaaacgtttatcatgtgatttgcggaatccgccaatttatttatctacaaatagaaaataaacttaagtagtgcattttaagtttaaaggtataattagagtgtgtaaataagacttacgttggtttcagttctctggttccagtcaccagcttgcaaataaaaacatatattatctaaattcatattttacactgtatcaagtatataataatttttataataatacaatgatagtaatagtataataatagtatggagattaccgatgtgatttagatcggaatgatacatctgaaaagcagattctgacatgaccgagggatctgtgcagtgcgatactattcttcgttttaacttctcacattcattacttttataatcttctttacatggatttgttctgtactcttggtcagcgttattatctgctgtattaccagtattattggataaataagtgtttagttggtcaggagtaaatttggaagggtttagtatacaaccctgctccttggttggaaacttcctgttggccctcaaaaagtgacatttggtctttgcaagtgcgataagtgacctcgaggcgtctcccttgaaatcacaactgtcaacgtcaagggtgttaatctcgcctaaaacgtatttccaacaaccagcctcattcattatcttggtataactcgtgtcatccaatgggacgccatcatcgtcaatatcaaatttatctcctaaaacaatatattaatagtatttgaacaatttatatgataaaagataagtaaaatgagtctgattaaggtagagaattaataaataagggggaaataaagataaatttgggataaatcaagagtagaataggagtggaatagttagaatttaggaaaataagggaaataagggtgttagtataccaattctattaaattgtgtaagacaaggatagggatcggtagtattatgaatgtaatctaaatcgatcgggaagttatctgtaacgtttttatcgttagataggagggacatgcaatcgctttccttctcctgcaagttgtttaaaattaacttgtaagtatcctttcccttcttaaagttcgatttagcagtggaagtccagttcctgtatatagaacagctggaaaactcggttaaaaaaaatatatacaaatttagtaacacatactttacactcatttcaacacatggtgtaataaattttataagaatagtcaaaaaattttttaataagttaaaagcttaaaaaatagaggaaacagcaggtaaaggggagaaatgtaaaaaaagttaaaatgattcgtaaggagacgcatgttttaaggtgcaagatactccaatatatacacccgtaatgtgtataataactcaatgggataagttaaacacattcgaggtgcaatatgaggggtaaactgcgaaacaaaggagaaagacaaaaaaacagtaaaatatgttaaggtatataatgataaatgtaaatataggataaaggtaataaattgtagaatatgattaaaaataaattgaaataataattctgaagagaaaatgggaaaatttaggaattatgtaaaatacttaaacataattatggtgaaggttaatttaaaaataattatgaataaataacagaaagaggatttgataggatttattataaaaataatataattttctaaagaattaagaggttttaaaagaaggaaggctaatcgctggagaatgtgtatttttaaattatgttgacaacttcttcaggtttttatggaatttacttacacatttttacctaactctttcaaacgcatttttagacgttttaaacactattcacttggactaaatagttattaatttttttactaatcatgaatttgaattttgaataatattgccttaggaagaaaatatttaaaaattttcaagttgtataaaattagttaatttgtttagaatttttaaaattagttgattgacggttaaaatgcctgaaaatgatcctttgcgagtcacttaggtttgtgctaggtggtgtaagttagattaatgtgtgtagtgtggcttgattatttggttatttctgttcatcttcccctttaaccctgttgaatattttaattttaggtattttgcctgtgtttgtgttttaagatcataattcttagaaattgagtgaaattttagttttaatgcagtttgtcgttttttagcctaaatttcatataaaattttagactttcataaaattttaatatataaatttatttcgtaaagttttaaaaaatggatttgagcaataaagagaagctccagaccgccaacgctcttaaacgcgccacttcaaatttggccgtttttgactctaacggaaacgtccttggagtatttcttactcaaaatacttagttatttagttatatggtgatgtgcttaattaatgtaattttagggtatctatgtgtggtctgatttggcccctgctgttaaagaaaaccctgaacttatgttcgccaagtgtttagttcaccccggatccacaacagaaaagctaatttgttctcaagttgaaccaccaaatgatcaggtttcctcgaagcaagtctattgttatatcttgcctagttttgcaattattttccaatatatctagtaatacatttagctgccactagttaacagctttataccattaaaatttcacatattaattgtgtagaaatttgaagtgccattagcaaatgcttggaacactaatagtcaaattgaccctatgacttacggtgacattgggatgttacctcagacttcaatcccgtgtgttcttgactatttacgtcaccgttttcacaagaaccagatttactcaacagctgacccacttatggtctccattaacccttttaaggacttgggaaactcaggccaagatgtaattgaccgttacaaaagtgctaaaagtctgatggatatgcctcctcacgtatattacacaagtcgaagggcactagaaaatctacatgactataagtattcccagacaattatagtttctggtgagtctggtgctgggaaaacccagtccgccaatatgatgatgcgttactttgcgtctggtagtggtttgaataaaggtagccacattcagcaggtggtaatggcatttaacccagtcctcgagtcttttggaaacgcaaaaaccattagaaataataacagtagccgttttggacgtttcatgcaacttgacgtggcgcctgagggtggaattcgttacggttcaattgtaacatttttgctggaaaaatctcgtctggtgactcaggatgatgatgaacgttcttatcacattttctaccaacttctcaagggagcaaatgatcagttacgctcaaaacttaaacttaagcgtattaatgaatatgcgtacctcaatagtaaatgtactgaggtgaatggagtggatgatgcgaaagagtttggactaattttaaatagttttgagaggatgaaattgagcgaagatcagaaggaaactgttctaagtttattgtctggtgttttattacttggaaatgtagaagtttcaggtgaagaacgtgacggtttaactgatgccgctgttattaccaatgaaagccttctaagggattgtgcccaactgttatacctggactatgaccagttaaagtatgatttaactatgaagaagactatggtgggtggtggcgagattgtaagtcctaggagaaaggacgagtctgaggttttgaagaagagtctgagtaaggctgtttataataagctgtttttatggctggttgccactgtaaataaaacaattgctcctcctgagccttttaagtatttcattggccttttggacattttcggatttgaagtgtttaagaataattcactggagcaactttttattaacattaccaacgagatgttgcagactaacttcgtcaatatagtgtttaaacgggaggctcaattgtatgcagatgagggaattgcaagtccaaagcttgagtacgagtctaattcgcttgtgattgaacttctctgcggtaaaacaaagtcaattttgtcggttttggaggaccaatgcctcgctcctggtggtaatgacatgaatctaacctcaacttgtaatacacaactttccaataatccaaaatacgtcaagtctaagcaggacaaatatttcctagttgtacacacgattggaccaatacaatactgttctgatggtttcataaataaaaacaaggatttactaactggtgaattggtcaaactggtaaacgcttcacaaaatccactcgtttcggaattatttaagggtgacgaagttgttagtggaaagttggcaaagggaatgttaattggttctcagtttatgagtcaattggactcgttgatggctttgataaacagtaccgattcacactttatcagatgcatatcacccaatgataaaatgatgcccatgacctggaattcggtccgagtactcttacaattgcatgctctgtctgtaatcgaggctctacagcttagaaaattagggttttcctaccgtcgtacctttgctcagtttaacgagcaatatgcctatttaaatttggctgtggttaaggactctaggctctctgataaggataaggctataaaattggtaactgaggttgggcttggaaattcagattacgcagttggaaagacccgaatgttcttgactcgcaaagctgctaacaaattaacttctatagtcagggaaagacttgcaaagtgggctccgttggctgacttgctggaagctcttttgcttagactccagaaccagcgagagctaaagaagtctgtgaaatctatagttcgcctccaggcacatttgagaagagttttgaacgagggcgagagaccagcaaagttggttaaagtataagagtatttgatataattggggattaagtgtgtataaaggttatgttgggactattaagtataaattagggtaaaatatacttaaatgatatcattttaaactacaattaagtccaaaatacaagtaatcaacatgtaattttatccggaacaaagtaagttagggtaaaaagtatataatgtgctattgttttatatatgttttatatagtacaatggtaaatctagcatacaaaaacttaaaacaacagtaatcaaatattaataatctagattaacctttaaatataataaaattaaggagaaaattactagttcggcccttaaataagattaattggcaatgaacaatcacaagtgagcctctggttatcaataagaagaaaatgaagtaaatgtgtaggatgtgtaaaatgtgtaagatttaagtgtttaaacgataaatgagtgatttagtgtgaaaacacaactaattggtatagtggtggtgtttatagtgtaaaaatagtttaaaaagatatggatcgacttgatcgttactataaaatcagcgtgattgtgtttgtaactacgtgtttaatattactgattgttgtagcgtatttcatgtgttataacatgactctgctcaaggaactaaacaaacacctcaaaaaacttttgggctgaccttcctagggaattttttctgattttctcttttcgaaacaaattaattgtgatctatgtgttgggtgggcagacttttagatttttttattattcacaatttttacctaaactctaaaaaatgtcagatcgcattattccaaattttagaattaagagaattctcgaaattgacgaacatatgccgaaaatgaacaaaaaggcgctaacaacactcgcagcagcagtggtactcatcgccctaactataccattaaaatacttttaataattttttagaaggtgtttctgcaagaatacgccaaagatttacataaacacattgttaacaccggtgattcctaccctgtaaataccaaacatatcagtaccaatttacacataacctcgatatagctatgagctatgactaaataaatataatgtggtttagtaaatgtatcgtatgatcctagatttatcaaatatgaattcttgacacacgctaggaaaattatagaaaaacatgatgacaacaccactccaattaacaaactaattggagctaccagtaatattggttcctctaactgtactagtgccactggcttaggtaataagcctgttgaaatgaatgaaggttcagcagtcacgagtaaacagttggaaagctctgtgaagaataatactgttagtaatagtgacaacagtaaaaaaggccttaaaaaggtattgaaaacatcgtcgaagggcggtgttaaaaaaatcaaaaattccatattatcatatttcacctctagaaattaattttttacaacccgacccattcgtttataatatttccccattagtttaaaatacatatttttaatgtgtttatttattggttagaggtataattggtataaaagggtgtagaataccacattgccccatgtatcaaaaaaattagattaattttatgcttaacggttttattatttaagattaataatatttattaatttcttgagaaaatgggtcgtatgtacggaaagggtaagggtatctcatcctcgagtattccctacggtagaaagccaccttcctggcttaaaacaaaaccttttgaagttgaggaacaaattgcaaaactggccaaaaaaggacaaactccatcacaaatcggtgtctcattacgtgattccatggctattccacaagtaaaagccgttaccaataataaaatattaagaattcttaaagcacaaggtaattatcatatattaatttattaccccaatatcataataagtttttcccctataacggatggtattaatatttatttaggattagcgcctgagattcctgaggatttgtactttttaataaagaaggcagtgtctatgagaaagcatatggagcacaacttgaacgacaaggactcaaagtttagactcattctggtcgagtccaggatccatagacttgctagatattataagaaaaagaggcaacttcccgccacctggaagtaccaagcttccaccgcaggaacactcgtcgcataatctcttatccactatactatatactatatatacattggatgtagtacggatattatacattattgatggaggttaaaatgagtttatttaagtgtaagtcagattggattgcttgaactaggtcttcaagtgagttgtattttgaatcagttcttaagtagccgtaaatatccaagtgtacttttaatcccaaaagagagtcattaaatttatgataaaagtaaggttctacagagtagttttctccgtagaaatgagggttaaatcctatagatactattgaatttacacatgtatcttctgatacttctttactgccatatatatatccatatgcaatgtatacccctatttaatcattgtactggtgagagaattgatgagataagtatgatattagtacctgtaatgagatgtggaaatgaattgcatttaagattagcggttgagatgccaagtaatggtagaccacgtcccgaacctttaaacacttcaccaactattttaactctatttctacacatattgttgaaatttgaaaatataagtaagcatatgaatataactgagtagtaatactttaaaagtaagaaacagcctaaagttccagataaggtattaacatccaaagcgctctccaaatccacttttaacggtctaaactatgaataaaaagatacaaacattacctttctgaagagcccttttttacatgagttttatttacatctaaattttcccctagaattcccaacaaataccctaattcacaggtgtaacaaggtaaaatagaaaatacgtgttgtattatcgacaaaatgtttattgttagaaactattttaatggagccatacaatagactatcgggattaatcttaatatcttcgaatgtattaattatggaaattgagtttaaatgatcctgagtcatacctaaattatgattaaaatgtgtaaaattaccgtgaatagtaaaatagtttagtgtggattcaggaaaggaagtgattagtataatgctataattattaaaatcttttaaaccaattgaactaacataataatcactaaaataagttaaattggccaaatttttgccaacatttagaagagaacttggtgggaaagtgtgtaaaccaagtaacaggaattggtacaataattgatttaaattttctaaagttgtattatcattagttctaagttcatttatagagattttgccatctttggcatttaaataatataaagttgacccattaaatactttacaaaatgagtttaattttgggttcaatttactactttcagatgataaaactgagtttaaagctgacaaagattcttcgattaaattaaaatttattaaatctgcctttaatagtttatttatacagttttttatacaagtttgttctaaattatcggataaatctgagtttttatttactgaatcagagctaatatcataattccaaggagaaattaatgtgttatcaatagcattggtgattgtgcccaaaaaattgacaaaaacagatttataatcaaagttaagattatcaaagtcaacaatcaaataagaggaatcattttgcgattcattattagattctaacatgatctaaatgaaaatacattaatttactaaatgtgtattaattatatcactataaactcagtaaattgtaatcaggttaagcactatacaaatagtatatataaagtaatatatcagtggaattttgactttaaacagttagttttttgttaaaaattcttttgtttcaatagttgataaataaaaaaaatacttgtgaaaatggatgtggaaggctacgtgagagttggacttgatttcggtggagattcttgcagggtttcagttgttgataataacaacaagattaatcttcatgttaatcggcttgcaaacagacaaactccctcaattatttcatttgataaaaggcttaggtatgttttatgtacatacgtatatatgtgaaagatattttatttgttcattaattataatattataatgttttacaggatttatggagaagaagctgaagccaggtcatcaactttgttcagaaatactatcccagtatacccttaattacctttattttccttgatttatcttagttattgcaagattaatgttatatattttatagctactaccatatatcgtgggtttggggaaagaagaattgttaaaatacgtgaaggaacaccgttatttgtttttatcggacgttgatgaggccacgggatcgtttaaagtaacttttgacgattctcctctactcgttcacccctttgaagcctacgctttctttgtaaataaacttctacatactgttagaactcaattcaactgtacaaatgacagtaatgagaagattatgctatcaattgcagtgccaacttaccttacagaacagtttaagaaatctgtacaatattctctttcattactgagtacgatttttattcatttgtatatagataatgtagcactacatacagttaataatgttatatatattatcaatgtaataatttattagaactgaaggaagtgaaattattcaaagaatcggaatgtatattgaagagatggtcggattctcaattgccagacgcatataatgagtttgtaaacttaaaaggcactcagaacggtgaaactggagtgaatcaacggatgagagttgtgtttttggatgttggatttgttcatacaactttttttgtggctgaaatcgcctcagaagaatcaacgttgacagccaaaattatctcagaatcgtcaacagacactataggaacatatcaagtaattttttacattttcataaattaaaatttaggtttttgaggttttatgtgattacattaaacagcaaattgaaaagaattataatactaaacttgaaattccgtcaagacagtcatattatctatacaaatcagtatgatttatctagataaatatagctaattgtattatttatatagtatatataatattgtagtgtgtaaaatgtgtaaaagaattgagtgtgttaaatgacgtaaaactagatgttgaaagagtattaccaaatgatgacgatttctccactattgtcgccagacaacaattacacttactcacacagcccattcaagtattttttacataactatacactataacataatatcaactataaaatactatttaatatataatatattattgaatgattagaatggattaaataatttgatgaaggaagtaatgagtaaagtggatgaaggggtgggatattattcatttgaaatgttaggcgggggttcaagaatgccttttattaaggaccttgcaacggaatattcaggcttattgaactgcgtcagaggtgttagaacatcacttgatactacctcagcagtgtcgtacggggctacaagtcttttggttaattccatgggacaaacaacacagactgagaccacttacccagatccagctcattataatgaaatgctagaacgtgagaaatatgtaagaaatgtggaacaggaagaaatgaataagatgatgatattaaatgagattgataattacgtgataaagacaagaaatgacttgacaggtacttataagcacacagttgatccagaaactatggagaaaattggtgcacttttagatggtctacagtcattcagtacccagtcaataagtgacaaaagcgtcacttcagaatcgtgtactaattcattatcaagtgtacaagaaaaagttaaagaattggcaccagattacctactaaaacttgaaaaagatgctgaacagaggttaaaggatcagaaactgagtgagagtttgccaataaatcatgtacaaaaggaagttgatatggatgttgtgttgccaaatgggacctgtataaaaagagcacaaaagaataaggatgaaggaaatgagttaataggggcagggaacgtagaacttgcaattcaacactacatcaaggttattcagtactgtgccaaagtaactaacccaaatcaagatgaaaaaactgtcatcaatcaactcagattagcaacaaacttaaatctagccatggtaaatttataacatttgttatcatacccttaattcactagttatacactattaatatatagtcatactagtgttggagttgatagtactactaatattggtgtatagtagtaataacagtatataacaattatattggtttagtgttacttgagaatggatgtaccagcgagttataataaagcagtgtcatgttgtacttcagctcttgatataaggtattgtctcagtacttagttatatatactgctggctatttggatgtgtaaggtggtccccactgtgttactaaattttttataaaatttctaaatttattgttatttttaatagaagaatcttttacaaaaataaataattattttatttctttcttaaaattttagtggtgttctaatattttttagcccaaagaacaccaaggcgttgttcagaagagcagtggcctatgaaaagttaaatgattttgaaaattccctaaaagacgccaatcaaggattacaactggacgctaataatcaagatttcaaaattgtatccatctaactattttattcattgaaatgattaagttgttatattatcactaaatagttagatcattttattattaccaaattattaaattactggttgtgttaaaattgtttagatatgtgatcgagtggagaagaagataaagttggagctacaaaagcagaagaaaatgttctctaaaatgtttggttaaatggataattacaataaactactcaaggtaatttttacactactgtactagtactacagttaagtatttataactaatattactaaataacaacaccattattgtgtatcttagagggatgtaaagtatatgaaaagagttgaccgtttggctagaagagtgaaacatgttttattctttacacatccggcttctttaaactcaagtgtcagtgattttacaaagtcaacgtcactggataccagatacaactccaactcgtcctactcattaagttatagtgattcaaacaccattggagacaattatggttacggagataatgatagtatatcatatgataataatatggtgtacaataatagtatagtaaacaatagtgttgataatagtgtggaatcagatgagtatgaaacgatagagtataatgatatgaatgtgcccatgataataaagtcaacaacagaatgtaagcaggagttgatatccaagataaacttttcatacgcaagcccagaacaagttaaaacagtatacggtttatctcctattgattacagaatcaacgcactaaaactagctcttgaccaattaaacaacttaccagttcatgacatttaatctcataatactataaatttatgataatagtgtgtagtattaaatatgtagtatagtaatagtatattagtgtacattctgtattgagtgttatgattgtgatttatgtataatggatctccatcgagtgttaaaggtgaaaatatcaaagggaatgttttgatcaggaccaattttaccctcaaagggagttccatcaggattaacccagtcactggccctaatttcattgaatatttcacggtcaagttgagtggtgattgggacttcctgtttcctaatcgctcttttattcttaatttcctcggtcattttaatgccgtatttagaccttgaagaagcccggttcttgacaggtagaaggtcatatttacctctaacaacagtgtaatgacagccactgacgtcctgacatctaccgccacgaactaaaacaacagaatgagtgtgaagattgtggccttgaccaggaatgtggcaagttactgttcttccagtggtaagtctaactctagccaccttccttaaaccagaatttggtttcctaggagttacaagcctaacggttactacaatgcccttcttctgaggagctccttcaagccaacatgacctccgcttcttaggcttgtaacgaggaaccatcttaggcctacgcctgtaaaataaacgacctgatatattcctggtagagaacgttcgtacgctattaatattaggagaatttactaatttattgaaatttgaattaaaagttaaaatatatttaaaatcagtagataaaccattagaatgtgtaggaattgaaataaaacgtctaaaaactgaggaattgaaagaattagtgaatgaccttctagaagaaaaggtagaaatgataaaattttctgcgatatttttaaatctaaaaggggaaataattgtcatttcacattattttcaggtgaaagtgatttgagaatcaggaatttacacatttgagaaattttatgactaacaaagaaatgttatagatttaacaataattaaagttaaaaattggttagtttaataatataataaatttgttttaaaatcaagaaagctcttgataatggggagtatcagagaaatcattaattaacagatgaattaatttgtaatattatggaaggcaaatgaaatggatataatttctctgtttgtaatatttaatttattttttaaatcgtctctttccttatattttctggttcctcaaaatggcgaacgctgttttttcgaaaatgtgcctgaaaaggctcttttatcagtctcgtatgatctcatctcagaagaaggttataatcatttactttacatattttttgattaaatcctttaaactattttaactattcatattattatatatctaatattattaactattgtatacagttaaataccgttatataaattacatatccattatgcttacctttgtataatattatataatttgatgtaggtaaagactgtgttttatctatatcagataatgaaaggcgagttttaaagaatatgaaactagaccaggaccaagcccatagtatgttgtattcatgtttattacattgtttagaacgtctgtcttttgtttcgccatcaactggtaattataatatctgtgttcattgtcctggacgactttggtacatgagtcaaatgtgtaaaatctcgctgaattttgaaatcgcagacgtcagctcaggcggagattcatcacaatacgatgtaaattatgaagtttgctcttaattataatagttattttttatggaaaatcctaatttttgtttagacaactgctaagaaacagcaagtggagagtttaacgagtcacttacaccacttcatcgcatccgcaaacgtgattcaggagtaccaaatttccgagaaccgcaactccactaaactttatgaccactacaagtcaatgaataactggattctagtcttctatttgcttgaaattcttgttgttgtcctcacttccgctttctctgtatatcatatcactagatttttcaaaactcagtgtttcatttaatatgctcttgttatacttgatatgttatatctatgtatggtagtgtatgtacaaaggggtaaatgtacataatgagtataatctgtatacatacaatatgtacgtattgtacggtatacatgcgtgcatgaaattataaatagataattgttgaaattagcaagtataaaccttttcatcgtcttgtgcataaacaattggagcgttatctgagtttgacaagttaaccaacaggctcttaaacttagccagggataggtccttttcgtaggatttgtaggctgcaaataagtcattcaacgcaacaccatcaccataatccaacttttgcaagttgtccattaaattcttgttaaactccagtgaaagttgttcatccgtggtttctgaactttcagcagttttgtcagcctttttatcagttgtggtggtagtagtttgtttggaacgtttaagtcttttgttgcccttagaagtgctgcctcttctactggttctagaattctcacgctcctcgtcagatgagagtaggtctgcatcaacgaaatcatcatcactttctgagccactgctgaaatcaacgtcctcgtccttcttactggaatccttagttgtgtaaacatctccgaaaatagtatagttcaagagcttcactgcggcttttacatgttccttggttatgtatctactcagtttgagctttgcaaatgctgttgagagcctcagaatagcttccaaagtacgaggagaaacaagctgtaacaacttcttcttgttatccttgcatctctggcgcatctgggagtaactcttgctgatctcatttcgtgccaaaagagttagttcaggtcctggtgaccagttctttgcgttatgcatctccttgtagtacatgtccttgcagtagtaaatgtactttttaagtgtcgaaaggtcaagaatctcatgctcaactccattgtcatctaagtaactcaagttgttattaaaaagggagtccatacggtctgaagtgcttgtccgtccagtagttctaccacttctcaaaacccttcctgtcctcattctagcagtattcttctcttgattcgcctgcaaatcagcttctgcacctacagtgtcagttttaaaatcagacccagtgttgttcactgttgttattgtgtactggacttgcaattgaaggtcactttgaatcggttggataactgatgacttgttcaccctgttaattgatggtacaggcctcgacttttgtgttatgttcctcaaaatcgcatccgctattctatcatcttgcatctcattgttcacatcacgcacaataaatatcaagtcaaatctacacaaatatgagatagaattctaagtagttacccataataatgtctgggagtattcgcgtaaactcgtgataacaaatttaatatgtaaagtatgtaaaactatcttagaaaatagtggaaataactgaaatgacgtacctagatagtagtgagtattcaaaatttaattgttcattaatttgcatatcttcagaccagcagccgtagagaggattagcggctgccagtactgtgcatcttgcgtttagggtggtgtggattcctgcctttgccactgaaaccgtctgttgttccatgacttcgtgaattgctactctgtctgcgtagttcatcttgtcaaactcgtcaatcaagactatctttctgtcccccataaccatggctcctccctcaactttacgttctccggtttctaataaaattgttactcagtgatttataggttaactgtatactaaactacatagttaatgctatggttagctgtaaaactacgtaaagtttgtaaatctaagtaatcaggaggaatataactaatctagtagtgggaagctccgcaaaacagtaccttcatcctgtacaattgcagcagttaaaccaacaccggtggaacctcggccagtggtagaaattgtattgggaagtagtgccattacaaacctaaggagttgagatttcccacaacctgggtcgccaaccagtaacacgtgaatatcacctcttaagttttccctagtctctccactggtgaatagattttcgttagggttttcagaatctaattccttagagttgtaggacgtttgttgagaatcattcattggattcaaatgaccgccaacaagcattagcaaaatccccttctttacaagtgaaagaccacaaagtgaaggagccacactgttggtaagaacagttattgtgtcatttcttcctgccaaatacttgaatttagccctgtcatcatctgtgataacagtagtgttagaaaagctatactggtccttaattagaagatgatttgccaccagaaacggctttcctatactacttccaattgtgcttgagttaagtgtattaggtgttagcatcctgtaaactccccaaatgcgaactctatcaccacacttcaccttgttgcacaagtcgtcttgaactatcactgagacgtatctgggcatttgacccaaagatgagtcttctggtgtttcctgaagtacaaacgtctgatagttcttaaagttactgaggcctacctcctgtctaaacaccacttttccctggggatcaactggaggtggcattgtggtgtccactttagtcttgttcaagtcagtcaagtcgtagtggttccttatgtaaaccatcttttctctctcgttgtatacgtccaacaaatcctcgccaacatacacactcgtactcaacttaggatacactccagaacctacaataaattatttattggtatataatgtgtatgtaaattttttgataacaacctattctatctgtgtaacactagttcatgcatgtttatggtatataactaggtagaaagtgggtgttacatttgttaataactccttcaaccgcaacaagtgtgttgatcatagttgatgataaacctcttggggtaacatggtgtcttccaagccagccgcagattcctagttttggtgaggggagtggtaccttagtggcttggttcttccaaatctcgccaattgcatcttcaaaagcctggaatgaaacgtatggtgactttattaatagttttgtgagtgaatttgcgttgtctgccctgaggtacaagaggcttaaattgacaatgattcgtaggtgcattggcatttggaggttagttgtggcggctgatttctcatactccttaaaggcctcttcataaagttgtacagttttggagtaaatttgtttattttcggatgcaaacgttaaaaaacgatcaaccaaggacttgtaattttgctgtgcaatgatgacactcttacgggcgtcttcatattcagccaaaacgtcctggtttagcctatccaaaagtttcttttttcgttccacggagtcgtcgttctgagatgaagggtgcagattcacagtgccggaggaaacgcggtcgtaaaagtcgagcaatttcgaagtttcgtcttccgacgaggtcataatctggaactgattaaggtacgagttctgtgtgctcgacaacagatttgccgaggattccgtacccgagatctgactcattttctacacaccttctcaatactagttatactactcgccggtatttgaactctttaaattaatattgtaccaaattgtgcctaaggtgatttggaaaaaaaatcaaaaaaatccagacataaatctacccgctaaaacacacattggtccggccgggcgtcggattaaaatgactgaaaattttaagttcaaacaactactttgtcctgatagcgaaaaaggaataatataagcgaattctttgtgtatgggaattcggagttcatatggggagcagattttcctaatttctctcttcctatcttaatttttttctcatggcttctaagcgaattctcaaagagactgagagtctcgctactgattctcgtacgttttttatttctacattttattttttttccaattatatataatataccttaatataattcgtatatcatactataatccatattttatagtataataatataataataatatattttaatatatacagtataaaaattcattaattatataataaaataatactattatgtagcacctggaataaaggccgagttatttgttggaaatgatcggcattttaaaatacatatgcaaggaccggattccacgccttatgagggtggagtttatattctagagttgtttttgcctgagcattaccctatggacccgccaaaagtgcgtttcctaaccagtatttaccatcctaacattgataaaatcggtcgtatttgcctcgacattctaaaggacaagtggagtcctgctttacaaatcaggactgttttacttagtattcaggcacttttatcggcccctgaacctgatgatccgctcgatgcgtctgttgctaatcatttcaaaactgaccgtgtgggagcagaaaaggttgctcgtgaatggaatcaaacctttgctgtctgcaataaattagattaatatacttttcgcattatatactatattatagtgattctatactatcaaccatatacattactatacatatacacaaatagtatagtaaattagtatataaatataagtatgtggagtatattaaaaccataagtgagtgattatttagttttaaatttgaaattcttttcattaaatagttgctggaacatgtcagcgatgtcgttgatggccactttgggagaccctctgacgaggctccagatggtcaggatgtatacagttacagctagtacgattaggagatcaaatgctgggtgctttgctacgaagacattgcaattgttgggcacagaagagtagaacttgtgttcgtggatgtgagttctaaagttctgtacctgaatcttgcccaagtttgactccaaatgtgaaactacttccttcacagaatccaacaataacaaattcgtcgttaaaacgtttctaggctcactcaatacttcatcccacttctttacattgctttttatttcctccatctgaacagttgttaacattgataatctagagtaaataactgatacgtcaaattttaattgatcatctgattttagtaggctcaaaaagacttgagcgaaatcaacagttctttgtgttaataaattataatcaagcctaaacaatggattataggtggttatattggataaaaatttataattgtaactaagtaaaccctgtatagagcagaggaacgaacttgaaattaagagaataacatcttgtatatagtggtgtggcttcactggtagtggtaactgtaaatgacttaaaggtgtcaagttcgtttggtagatttaattcaacatttgataaattgttaaatctactctgatgattatttacgtctttttctttattttcttcatcaacggtttcatcttttttcaaaggattttcctgtttcacaacattctcaaacgatggatcaaattcctataatcatattagacacaaaggtttgttaatgagtggccagaatgaagtaataactaagtaactaagatattaatagtaataccctgagaaaaggttctaagttagtgaagaaatcattgagggtataaaagtataatttatctccagacaagtcctggaaattaactgcaaattcgatatcatcttttttatagttgtgtaaaaaatgtctcagaccagagtaatttatcacggatcctgagtaaaatagaaacattaggtcgtaaaactcgctcttaacgtccttcaagagtctggaaagctcaagggttaaaatcaaactactgttgttttgggtagtacttgaatatgtttgcaaaacgctgaatgtatcaatgttaacagtaaccaatatcttttttctcttcgtatcagaattatcattatcactatcacttttctcagtatttaattctccctaataaaatatgatatagcttggtttggtaataaatattttactaattatgtggttaaaaacatacgtagaggtttagagttaagaaatttgatactaagtttgactcaaagccttttgcgttaacacgtacatcatctcccaataatttttctaaataacatttatctcctgatatagaaatggaatgtatagttatatttgtaatttggtaaaaaatacttgaagatttggttaaattgaagacgttttcaacactttcattatattcagtcactgataaagaacatttaggtttagatttatataaaaactgctcgaattttaaaagagtttcctggtgtaattggttggaatcactgcattttggtaagtttgagttagagaaatctgtggcaaaggcctcgtcgcatttcttattttttccagataaaacggtatccttaggaggaagtgtaagaagaagaacgttattggtcttgagaacattcttgaaaaaaagccaataaaaacgctttgttaaaagatcctccagacgaagcaagtaaacagtcctgcctctggaaatcatactagatagaaatttgtccgatgaatcggtaagtccgaaattcccaggtaaaaggtagcgtaacttgccgtcaactgccaggtgaggaaggccatagtcattacctccaacatgatattgtacaaagttatgagccaaaaactcatgagaacactacataataattattaccatatttaatatagtaaataatatatatttatatctagtaatttgtaaaattaacagtaaataacgtgatctcacatttgataagcgtataaacgtataaagaaccaataaaaacttaaagaatcccattttaaattaaaaataaaaaaagtggataattaaaccacaaaattatactggtattacaacactatattaaacgatgtgttgttatatcacaacatactcataattttgttaattccagatatttctcatcattaaattataaataatttattctctgtgaaataatatagatgaaaataattgtgtaggaatttctctctagtcaggttcgagaattttcgttgatggaggttggtctaattacttgttaatttgttaatagggtagtaaagcgttaccgagaattaatgtttacaagaaattgcccggtttgtgtgcgtttatgatgttattcggctcgcttgttgaaattagtctcattaatggtggactctactcagattctgacagaaaagaccctaaaaataaatcaaattaattttataacattttctttataatttacttaatttacaatgaaatctgaagttaaaaattggagcacaaactgcttagaagtttgattcttattaattccttaaattattgttaattactacaatgataatgtgtttatagttagttttggtgcgattggattcattagatgagagatttgcagaagtgttaaaatgtgtagaagaacgccaaaaggtattttataacaattttttggattaatataaatttgtaggaattacaagataaaatgttgatgattgagagatatttggatgaaataaacttgattttggataagaaaaaacaatgtattgtgatttgtaacttgaatgaaaaggtaaatttgatggtcaaaaactattcaaacaactctaaaaacgtaagttttaagacaaattgataccatagatcttggaggagtttaaaaaacgtttaaacgaaggagttaaaacgttgtttgagtcatccaatttgtactcagaagttgataagtttaagggcgatatagaatttttaaatgaaaagaaagatacactttccgagttaatttgccttaacaatttacacatcgagaacttaaacacaaattatcaaaattcagtaaaaaatattgtcaaagcaatacaaatcggtatattcttaggcacacaatatatctgtatatactacattaatatgttaatatagaaacgaacaaattaagtcaagccttcagaatatatcaacaagttttttctttacacaattatatattatattgataatttttgataatgtatcagataaaacaaatatccaaagatgagttcacagagtatataatatatattcctatgtacaatataataatgatataaatgaaattagaagattgaggaatgcaaaggatgaaataagtgaatcattaaacagaatgaagactgaaagagaaaaggaagaagattcagtcttgaatcaacttgaaattgcaagtaattcccaacttcatcattcatcttcagtggaaaagtttgataacgttagactttaactgctttgtagtatatgtaaaaactaatatgttacaaaatacacttggaaaacaagtattaaatataagagctagaaaaaaagccagtgaactgcattaggtccagtgttcttggaagcttgataagaatagtatttcctaaccagaagagataatgactggaagaagtaatagatgaacttcccgcttgcccaaacgacagcgtaaactacagagcccaaagcgaaaatcaaatactttctcatttcaaattttattatcaacacattttaagaagcataggaaaactttgtccagggccagatgtgtggagaaatttttaaaaaactacgttcagaaagtggtataaaggaggattgaggtaaatttatggaaataaacagtggttaaaagacaaattgtaaatattaaacgattgtgtggtgctgcgagaagtatagtgtcactttacaagtggaatttcctctcaaattattaacaaatctcattttagacattttttgaaattttactaagattttgtgcctctaaatatttttaaacaacttagacattatcttcgtcttaatgtgtaacctaactgtcgataaatgaatttgttttaattcatcttgattcattgattgtttaattcttaaattttaggaaattttagacgtttctatatttttacataattttcatactaatcgccaaatcggatcattttttatccgtatgtgttggaatggattcctgatatttgaataattggaaataaatttaatttcaaatccaaactcaaacttgatttttttgtcttgtttttacttgaaattgttctttaaactcacaaatatttaagtaatttttgtaaatttgcccattatatgtattttcaataatttttcaaaaccgacaattttcattgattgttataacttgtaataaaaaatataatctctttttatagttttagtgtatcggcgcttttttgtcacccgggattttaaattggtcgttaattaacgatcagttgtttgttattttatttgtaactcaatcatactgtttttttacatttcatgattttttacctcaatttttgtactttagttcaataaattcctgtttgtaacttaaatttcccacctttataagtataatggtctttcgcacatataacggagtttccaatttcaatctaaactttaattaaatttgtgtttcccctagtatccgatggactattccgccaaagatccagttttgggctctcttttgggatactttgactggtgtaaggagaatgagaggaagaaaatctacaagaccgcatacctcaagttcaaaaggtttgagcaaccctccaaaccttattcggcggctcctttgattaattcctcaaataaaaatggagtagtgagtggtgcgaagtggagtaagaaggataaggagtcggataagcgtaaagggtgtgaccgaatcgtatctaacggatcagaatcgaacgtgcagacacattctcgctccgaatctataggttctgacagctatatagatttattggagttggccaactattcatgccattactccaccaagaaatctgaatctaacaaaaacaccgccaaaaatactaaaaaaattaacacaaataagggtactaataaaagtaacactaacaaaaagaccgatgaaagtggtactcaaaataatataaaaaataatctgaaaaacgccccgaacaccggtgggaaaaatgtgggtaggaagagaatggatctgggggaagtgccattggagagattgagcacagtggatagcctgggctcactaggcgagtttggcagtggaaacttgattgaagattcagaagagttcagatatgaatcgcttttgtgtgatttgaggaggcgaggatttgagcccaagaccctgggggacgttttaagaagccggaaaaagcaatgggcaaagacccagtgcattcacagtagcgcaagagatgatttcgtcagacatttgaatatgtataagaaccacttcaggtcctacaaaaagacacttgacggctggatcccgaaggaatgtaacgtggataacaagtcgcactcgagaagtgctttgaatgggaaaatgacatcaagacgaaacattgaaaaccttacctggagtaatatcattttctgccctaattttcgaccaggtggtgagattatatataggttttcgcgtaagacaatgaagacgtacaatacactgtatgacacaattaagaagggttgggtgcaccctgacctcttggtttgtctagttagagatgcttcacacccagttagattcgcaacaccacccgaccaggattgttatactgcaatttatactggtccagagatcagcgagaaccttgatactaaggtcattttcggagaatacaccggcatagtgtacagagaggactgtgttccagactccatattcgagtacgcatttgagctaaactttacttcagcctcgtgggttgacgcagaacttgaatttagacatgataaacagtacatcagggatgttaatgggactatttttctcccaaatagctcgaagtacgtacttgatagcacacatgcgtttaacgagttgtctatggttaaccactgccagtcaatagcagcctacggaggagaatattttttgcaggcaaattgtgaatggcaacaggttatttttgatgggtggcctcacgtaattctaactaataaacagggggttaaaatccaaactggtgatgaactaattgcagattttggagctctttggtttcaaaaggttgaagaaaattgccataggcaattaaaacgtgaactcatttcatataggcttctttcaacagctaacaaatcggatgatactgttgatgctggcaagtatttagatgacgcagttgatcataaatcactacatgcggataaatcactcaaagataaattaataaacgacaatttccataatgataagttattggatgtggataattcactgattaataaaataaaagagaatatattagtacaggaattacctagcgataggagcttggagaatttagactattttgtggttaataataacacatcgtatgtgtgtgcaatttgtttagacgaggatttgaatgacgacccaaacacgtcgacgaaaaagatatttacgcacagaaagaattcaacttcttcaacacaatatggcgtgtcagactccgcagtaaatgtagggcaaccccccgaagaatttagagatgaagacgacgaagatgaatgcatagtctgcgatgggtgtgatagaatattccacataaagtgccttgagaagataacaactacagcactcaattatgttcaaactgagttccaaaagacaaagtttattaactttcaaacgtatctgcagagtaacaagtacaatctcacagagggtaacctgattaacctgaacctgatcaagtggtactgcatgtactgtaggtacctgtgcaagcaaattatccaacatgaccttaaccaggactttatgccactgcaatcgtgtatttacatgaatagtacagaccccagtcccgagttacccgactcttcacaagaatcagtagattcacatcatgaaatacctgagaagatacctgtaacaaatcatgataaatgttattcatccactaataaaagtcttaagtctgaagtattggacgaaaagaaggagcaggaaccggaaaccgatgagtgtgaagtcgagctggttaataataacctcatagacctgaataaaatcacaaactatttcaacaaactgatttgcaacaccggtgatacacgtaataatagtgatacaactagtaaggagaatagtccaacacctaaggatgattatactgctaataataataacaatgttgataatgtgaaagggaaaggattgaataatgttgagaaaaaaggcaacaagagcatggagagggaatatcctaaacagaaaaggaagaaaattaaaagcagtttgtccctgaagtgtgctaagcgtaagaataagaagtctatggtgaagaccttgaaaacaaaatcaaagttattcaagggaaataaaatcaggactctaagaagaatgaagctgattaataaaccgacaacacttgaaatcgccaaatatctagttaaacagaagatactctctaacaccactaacagaggacagattcgactgtttggaaattatattaattttagaacaaactgctgtccatcagggtcaccgagacctgacaccattgacttggcaaactataaggataggaataatacaatccagaccaactttcctgcaaacactcttagtcccgtatctagccacacatccaatcacagttataaggatagcccaacaacaaatgctaatcctaccggttatgagaacgatttgacgataaatttgtttaatttagggttaatatcactgaacgcgcatgcaccttctaatttattggagtctgaaagtaaggtggcaagtagtgaggagacttgtagtacaaatagtggaaacgagcttgacttggcaatggaagatgctaacaactgtaacgttgcatattctgaacttttgagaaagtgtaatgatacaattaactcaagaaattcgagtggtgagaaggttaacggctatgacacgtcaacaaaaactgttaactctccaataattaaggataaccaggaatcgtatgatacaacaaatccgccaaactcaccggcaggcaatgagaattcagcatatcacccgacaatgaaagtgaaggagaaccaagaagaggtttttaacgtgaattacgacaacagtataatgaataatataatagattacctgaactgcaggtacttgatgggaatgtggcaagtggaaccgttttcagtattcggagaagcagtgagagtgtgcgtagattgcaataagaagtgtggaccaaaagcaaacgtgtacgtttgtagagttttaaagcgtcatttatctggtaactttgaccaccccaaggcaacaaacgttgagcaaatgaaggaactgatactcatctcgtttgagcagcacattaactatttgctcagattgctcgttttgaagaatatagtcattgacttttttattaaactctcgtgtcattttctcactaacaactatgctctcactgattcccctgctagtacggttaaggaggatcctgataccgctggttacaccacaacattcggtaatactggagatgatgagcctttaagcgacacaatgtcgagtgaagataatagtgaagaaagcagtgaaaaagatgacatttccgaatttgatggcaaggagttggatatcgagtacgaaaatctagatgttgaagaattacaatttggtgaggaaattggttcacaaattggtaacgaaattaagccgcaaatgagtaaagaaattgaaacacaagtgagtagggaggatagtgagttagttgaaaaaacacaaatgaaactgagagacaggggtaagaaggatgtaaaagaggaatcaggtgtaagtggccgtaaaagacagttatactataatataaacgagtttgtgaagtgtataactaacaatatgaagagggtaccgcaaggtgatattatgttcaactatgagttgttaaagaaattgggcggctttgaagaggatttcgtacgcatagttaactgtgacgacttgttcaagtacattaatgacctgtcaagttacatgtgctacaacgcagaccaggtaccctcgacaatacagcagatattgtccaaggatgagcttatgaggttcacgcacttcaggaagtacctgatcaaggacgtcaatttgttcgtaaacacaagttctaacatatccaataagggttcagaaaaaaagaacaaaaagggccagtcccaggacatctcagagtactacacccaacagtccaagaaaagtgatttcgaccacattatcaagagtacgaatagtgagctagagtactgggacacatattctcgtagattctcagatgagatagatgaagataccgttaaaataaacttaaacaacatcatcaagtatgaatttagtatggtggttattagtatgatagtagttaatgctataataatgtaattatagtataaaactttatctaaaaatataataaaaacatttacacacagtaaaataatggatttaggcataataaaagaattctgaagttgagacccgatgatgttcaatcccaggagttcatacccatgataggaataaaaccaggaagaacgatcatatatcgcaaattctcaaacggttattaccaaggtactttttacatatttttacacatttttaaacatctttttcatgtaaccttttggttatcatatactatggacaacttacataataaattatatataataatataatgcataggattggtgaataaatataccaatagtactacgtattttaaggtcgagtatagtgatggagatgacgagttgatggacccgttcgacctgatgaatgaaattatattgaacctgagtaacattgagaatatattgcttcagctttcgactcatgatgttaacaacgagagatttgttcagcagatagaattaatcactaacctgattaagaacaagatgtcatctgaaagatcaaacatagtttatggtaaggaaccaaatgtaggaaatgaagttaatggggttagaacaagtgaagagtttattgaagtgaaggaagatgatatcagaaaccactcattgttcaaaaaaatggccagtgaacttaggaattatatgcttcaccaactaataaacgtggaatacattagtaaaaggcgtaaatgctcccagtaactttgttgggagtatatagactatgaaataaaaggttattgagtaaaataataccattggatttccattatactaatgcaatcggatactaagtatattgaagtaatctgctattaaaataaattaaacgagtgttaaaacagctaaaacggcaaaggccaggagttcgacgtaatacaaagtagaaagattgacaagcgtgtacgataagagagcaacaagcacaaagaaaacaccccgaccccttttaacgctaagaaatcccatgtaagcctcaaccacattgttgtacttctccaaaaatgaataaccatcaccagtagtaacaactatcaaaagaccgaaaaagctaaaaaataattattaacaggataaatatgagaataagtgaaggaaagtaggtaaactgtacccttgaactagatttagcagataaagcgaaggattcagcatcgaaaaaacatttaaagcgtttagaaaactcacaaaacatagtgagcaggccgataaaaacgataaactccttaacatattcttttctacgtaattttcttattaaagcaagaattatatgattaaattaatttatttatctgaattgatagatgagtagataggtaaattggtatatggtagtagatgtgtaaggcatatataacccgtataaaatgtgtaagaggataattttcaaataccatttttgggaggatagtcgtagctctggtattgatccaaaagcggcgaatcgttgtccatgtcaattaaattatcaaacgtcataatattcacactaaatctaaaaataaatgtgtggcatgaatctgtgtgaacatgtatcagagaaaattaaattcattcaggccttaacaaattcaacaaatcgctcgataaaactacattattttcaacccggaccagcttataaagctccttcagctcagaatccgtcaacggctcgccgtaattcctcatcaagttctcaaatttactcaaagtcataccgccagacatctgaaaattttttatcatgattacataaattaaaaacaattaaataaataaataagttggaataaggggctacattttcgaaacttgttaaaagatcctgtaaatactccctgttctcactggaatacattgaaacggcgagaaagtccttaaaattgtcaaaatttacacttttgccgcaagtggcctcaaactcgagtaaatcggcctgagaaggagaagcaccgagttcccgcgccaacacacccgccaggtgaacatccaatactccatttttagccctctttttaaagctttcctccaacacatcaacctcaatctaaattcaaattaatttcagctcaaattctgccttctaacagtaaataaatggataatcgtgtgcgtaattggtgaataactagtggataatggatgggtaatgaataccagttcctcaagagcctcctgaacagtactatccgactttgtggaaagtgacctgagtttagtcaatttttcctggaagctcggctggtacttgaacccgggcatccacaaaaagtagtttagctcggaatcctccggcgagagaacaaactcaggctgaggaaggtcattgtagcagtctgtgaggcagctttgtactatagttttcatatttaattatttattcaattaattttcctttaaaactgttgatttagccaatttgtgctaattattggtgtaatgttccacacatacaggagaacacttataatgaagccaaatgcacacacaggttatgtgaaaagtataataaatagtatagttgaatattgtattaatttcaacttttctgattttttaatttcagcccagtggatatccagagcacaattgttacatgtacccgatcaacactgatgcacttttaaatatattctcgaatcctctaaataatgagtggtatggacaaaataagctccaagattccccgattatccctttcgatgcttattaaactccgactgaaagcgccttttaagttctaagttctcggaatcacgaacaaatgcctgaaataaattgtgcaggtagtctacagtttctcccttctccttgtacacattagctagccgtaaatatgctttactccatccaggatttaattttacggcctaaaatttgtattccaaggttgtttatgctggaatctataactaaacaaaataatgccaattacctgtttagcatcccatagcgattggtttaagttcttcagtttcaggtttgtgaagcttctgttagagtataaaatggattttaactcgtcaaactcagaattgtatggacataacgataacccctacaacaatttttacacattttattaaagttaacatatgtaaatattgtaaaaagtactttactgtagcaattagtcgcatttgtgtagtccttaagctccactaactgttttccacaatccctggtttcattaaccacgcttttaatccgttctatttcctcaggggtgaaatcttcacaatcatcacgtacgtataagcattcaagttcgtcggttaggtaattaacatcattattgtccacctcattttcagttttactcttatgtaggaattcaaaagtgtccgattcatttgtgaattcctttaaatactctgccacgttgtcatgcccgttcattaccgccaaaatataagcgttcttgttctacaaaatcatgtaactcttttttaaagtaatattcaactgaaattgtataaatatctgtgtttaaaatgcgtaaaaatagttaaaagttactctggaaacaatattggcatcggcgccgtgttctattagaagtttacagatactcaagtggcctgattcagctgcacaatgtagtgaagtccagccctgagaatcacaaatatttggatttgctccattttctaacaacttattaactagatcagtgtttccagaactactacaataaactagtggagggggaattgattttttggaatcacaactatcatcatcatcgtcatcaggttctgtaacatttggatcggcaccgtgttccagtaataggtcaataaggtctgtatgggactttatcacagctattgataacggcgtgctaaaagatttactgcatatatttacctaaacaggattacaattttgtatttataaattgtattaaatatttaataaatatgaacttacattagcattattctctattaatattttacaaatctcatagcttccaagctctgtagccacatgtaatgggcttagaccaaatttattcttattattgataccgcataatcctattaacagtaataaacagttgattctattctcttccaacgaagaggagtcatccaacttatcagtactgaccagatcagtatcaaatttattagtaataattgatcgaatcagataaaataatgagttttctttgttatcatcttctatgtgagccaggctaggtgaagctgttaagagggtgttcagaacctccaagttcccacctgccgctgcgatatgtgatacacaacgtttcttggaatctcgaataaattccagtgcagcgagctccaaactagtcaaaatcacttcgtcccgttttttactgttgcttttctctatttggtccttcaactctggagaatccgccaacaaaagtttatttacactctctttaagctcagccaaagtgcctgaaaaacaaatctcaagcacctccttgactaaatcactcaggcctccgatatcttccatttctaaatgttttaaagatttatactacatttggatattttacacaatttttacagttagattctaaattttgtaatattttacagtttaatattttacagtataattattacaatttcacgtataaattacaaaaacataattattattaatctaattactggaatctttttaaaaaacagaaaactaattatactccactcaaccctaataatacattctaacactatacacatcattcagtatatgtaaaatataattcatttgggaaacaaacttaaaagagtaaatctgacaacttatttaaatcagtcttcgccaatttattaattggattaatactagaatcaattgagccctaaaacaacaaatgattattccatactttacattttggaaaaaagttaacagacggtttcctacttcttcaaactttaaatcattaaaagttttaaaaactttaagtgatagaatcctacaaaaatgttattagtgtaatcactaactttgagtaaatgtagcaatagtaattccctccgtagtgtatcaggtgatcaaaattagttatacaattaggtgataagagttgataaactgggtaatcattgaatttctcattaaacatgtgaaagtctttaaaaatatcatcataattcatgctcttttcaatcttgtaccaatcgtcttcactcccataaaacctctaattaacataaaatattcatgtaattttattacctgatcaataattgaaagcatcaaaatctttgataaatcaactgagttatacaacttatagtcatctccaaaaactgttaaattttctttatttattaacaaattatccttatcatattcattaatattcttgtcgatatatattatatcatccaaatctaaattttacaaattcaacttatgatttacttacagtttgagtaaaacaactccaataaatgtgatgagaattccgcgtagtcaatagctccacgatttcctaccaataattagtcaaacatatttactcattaacataattcggtaaataacattgggtaaaataaataaaattgaattatacctgataagtgttgatagtgcgtatcacttagtagagtatgcaatatatgtcctagttcatggaatataatttctccgttgtatatgtcaatttttgttgttttcaatatttcttccatgttacttttcttaggattgacattttgtaatgataatacgataatggatgatggcagttgtttaataaaagaacgctggtttacaaagttattttcgtggaccaaatttaaaatgtacatgctattcttgtttttggtgttaattttcttcgaacatctaattgtgaactgggctgatatgctatgtttatttaatctctcgaacaagtccaaatataaacttgaaatcacctttccgtcctttactaaattatactttatcacattctcatcgtaaaacgtttctataacattattaatttaatgtaattgttggttatataatataacaccttgagattcagatggctcaatagttatgttgaacagcttgtttaataaaatgttaaagtaagtaatcagtgataggagtgatatatttacgttcctttcatttctggacatgttaatcaaatattctacatcccatgggtgtagttgctgttcagaaatatccatgtcttttttcgacctgttttcatgtatcaactgtttgtattgtaataattggtcaagatcattgaacaaacagggctaaaacacattaatgtgttgtaaaatttacctttaataactttgaacaatttattaaaaactcatacacatcattactattacttaatatacactccctaaaatatgttatccataatattatattaaaatagtgtaaaagatactgctgaatgtaatttaggtaattatcgtatcctcttaattctgatagttctgtcctaattttatgtagctctttcatcttttcgtataaactctacacaattgttatactggtttgaaagataactaagaagtgtggaacttgattactaatgcgttgtgagaaccaaataaccttcctcagatcatgttgattagaatttctaaattaagaatatacattgtcccaacatacttaagtaaatagttgtataaattttcatctttgggtattttctgtaatggatcatcagtagtatcgtctagttgaaatttaaatgtattgccctctactatggaaaatgctaacatctgttcattcttagtcagttctttatatttcatctaatccaaagttaaatttttgatgtataaataatggtaaaaataccttggagtcttctggtaaatgaactccctgttgttccatagacctaaccatatgttttagtacaaaactttcttcatttgttagtttctcctttaaattctccatcaacaacttgtaaatctaataaattaatattaaggtttaatgaaataataattaattcattacactttcattaacgttgatattaacaataaactcagaaaccatttctatacaggtatttgacattttacgccattcttcgtccggatggacatggctaaacaaataatttttaggatgcttttataccgtaacaattcacatggatcagctattgaacataggacgttagatatgtcatctatcacttctaaaaccttgttactctcattttcgtggtcttttttataccgttttactttgtcaattttgtttccagaggaattaattaggttatgaactaacgattgagaataattaatggaatcattggttaactttaataaatctaaaggggttttaacttttaaaccgaaatagccataaacatcttccttactatgggtaacatagtttgatttgttaaactttaatgtgttattcttatttagtttgaagtttttgttataggtgtaatgattaaatttagagaagctggatataaatttctgatttttgaggaattttacaaaggtgtgtttttgaatattttttgaaacatggtgaaataatacaatacgataatttataagcatttgataaatgtaataaatgccatttaatacatataattaacaatattttacaggaaagataaagaattaatctgaggggaatccagcattcccataattcttccttcttctgttatatgttatactcaatttttatattttaatatttggttttataaatctttggaattttgccctaattaggcatagattatcatattatgatactgaatgtgtaactggaatatgacccatcggtaagatgctattatggtcattaaattttatatatgttacacgatttgtaatattattcaaatagtctgttatcgaaatgtttcgttaaattctctgaatttcttcccaaataacgggatgctgtacaataatccacaatacaacttaacgtgcccagtttctgtagattctaccacaaaaaccatacaaaaatcaaatttaaataagtataagttattagataaaatcgaaggaacagaagatttaaaaaaactgcccgaagaattgttgccagaattgtgtaatgagatacgtctttatttgggtgaggttatttccaaggtaggaggtcatttttcaggctctctcggtgtaactgagcttaccgtggcccttcactatgtgtttgactctccctttgataaaattgtttgggatattggccaccaagcatacgttcataagatcttaactgggagaaaagataaactacatacgattaaacgaaaaggtggtttatctgccttctgcagacgttatgagagtattcatgatatatttggtgcaggccactcttcgacttcaatatcgtctttgcagggtttactagaagggtttttactactacggaataatgatcctgaaaatcaactaaatagtgtaagaccaaattatataagtgtaattggagatggaggaatgactggtggtatggcatatgagagtctaaattacgcaataaatataaaaagcccagtgatagttatatataatgataatgatcaggtttctctgccaacaggcatgaaatctatcgtaggagttaagccaatcgtgccatttttcatgcaaaactcctcaaataaacctgttagaccagtagtggattctattaacgagttatttaccaacttaaatcaatccagtgaggaaggaatccagtataataatgggttaaatatcattggacccatagacggtcataatttaaatgatttgttatatctattcaaacttatcaaattttctaacacagttcctgatagaactataaagatcatggataaggaaatacatggaccgttaatgatacacattaagacaattaaaggctattgttgtccagaagcattaggtcaactggataaaatgcacgcaattaaaccgaatactaaccttactattgtaaatccaactacaagcccattcagtaacaacttaaatagatcttatagcttacagctagacaacattgcagttcagaaccaggagttaactgacacacctaccaccattttagtagataaggaggccataagaaataaattggggtataacaaatttgacgaaggaacatttagtaatgtattcagtaataccttaataatgatgggaattatggatgaaaaggtggctgggataacagcagcaatgccaggtgggactggaattggagagtttggagattgttttcctaatcgaacatttgatgttgggatatgcgaacagcatgcagtgacattttcagcaggtttagctttatcaggagttaaaccttacgtcgcaatatactcgacatttctgcaacgtgctctggaccaggtgattcacgatgtggcaatacagaatataccaataagactcatcgtagaccgtgcaggatacgttggagaagatggactttctcatcacggaccctatgacctaaacttcctgagaccgctaaagaactttgtcatctcatcgcccagtaatcaagttgaacttgttctatccctactctcatccctgaatactgatacgccctatgttgtaagatacccaaagagtaaagttattgataaaaatctgttaaatcagttctatagtgaagatttgtatgattatgttaagttttacaagttttctgatgagaaattcgggagtaattttgaatttgatactgaattaaactacgtaaaaaaatataaaagtaaggtagtaagaagaggaagagatgttgtaatatatacattgggtcctatattgtatagcgtcgttgaggctgttgacaagataggtggaaattttagtcctacaatagtggatgctcgctttttgaacccatttgacattgagacttttagtgaattagctaaggatcacaagtacgtaatcacagcagaggatagtgttaacggaggcttgggtctaactatcattgaacatttgcagaaaaataatcaattgcacaattttaaggtataatagtcatttgatgaattttttaggttaaatgtatcaattatccttacgagtatgtacaccacgcaaccatacaagaacaaaagcaaattgctaatattgatgccaaaggcattcaaagacaaattgaggaatttctcaaaagcgattaatgttttacattaattccatgttcatttgtatactgtatatagtgggtatataaaattataaaggctggttaaagttggagacgctaagtctgccagtatataggtcaagatcatattttaaaacatctaaaaaataaattaaccaccggtaatatttaagcactagaaatacactagaaataccttggtcagtcctttcaaattccggaacaacacatttgtcattataaatgtcgtgaaactcctcaaaccagccgcttttcaaatcattaaccttaaagtcttcactttggtacatattatcaaaagatagtagtttatcccttaaattaacggctaaactataattagtgtcgttagagatggtaccgtttttataatcagggttatctaagtgatccttaggaatatcactggaatcaacggggtaaacatagccgttgcaatccatgcaagggccttccttctcaagattacaacacagacgaccgcaactcatgcagttactaaacacgacatgagtagaacctccacagtcacacctctttcgttcaactacagatttttatacattgaatatatataaaaattcatctagttatatggttaatagtatagtatacttaatggtataggaataatataagaaaaaggcaataatatggtaataagagtaaaatgtgtaaatggataaccagaatctctttgtttgctagaaactggtgtaagatctgatttattagagggttgaaatttattctttttatcaactttgaagaagatttgagtagaatccttgcgataaggtattaaatgaggcttctcaccctcatccattataataaaaaatgtagtaaaatttcagaccattttctataaaaaataataaaataacctaatatataaaggtatgcgtgaaaaaagaattgaataattgagtttttatggagttatcaggaagaatcaataatagcagatcccccatttgatttagccaatatctcatcatatagccataccaccatcataataattgtatttgttgaaccgcttaacgctgaaaataagatcattgtaaaatattctgtttttgactttttttagaaaagttattttaaaggaattggaattaataaaattctataactgtaaattatgaaaatggcagaaaaagcatgtagttttgtcgaaagctccttccatatcattaaaggagcagcttgtactgccttctcaatcccaactggccgatccactaaatccgttaaaagattggtagttcttacacattttagataccaattaaatttacggatatgtgcccttatttcttgtatttatattattaatatctctataggcaaattacaacgggattatgacgctgtcaaatctaaataacgtcccatcagatggtgactataacttgtttaagaagctaattgaggataaggtgagaatttttatagaaaaaatggtttagattgctgaaaatgcaagattccgcgtaattaacgttgatcgtactatggcggaatcaatttacggggaatcaatttacgacgatttcgcagtcccatcctcggttaaaacgtacagtcttagattcatactttagttaatatatcttaaattgttacataataatattgtttaggttgagattagtagtgttggatgaatggaatataaacgcaaatatccataacgtgttatactcaacaggtttgatacgtgagatctgcattaacaagttcaaatataagcctgaaactaatacggtaagaacaattgtttaaaatcatctttagttggatatccactttaatgttatacctgcaagtgaagagctactttgtaaagaggaggacataaacaaacttgaggactgcccactgaaggagaatgtgctgccaccaggagaagtcgaatacaactcggcacaataccttaacatcatcgacagcagtaagactgatgtcgtagattataacaagctcacatttcaatttggctgttctctaatcaccaatcacattcttaacaggtaccactaaccttaataagttatatttattaatcactaaattatgtacataaatttcttatattagggtaaaagcactagttggaaatgtgcacccctttttgaggagaaagatgttcttttgtcatcgcgattttgacaaactgctcgataactatgaaaaggggaacaaatttttcatttacactggtagaggaccgtcttcagaagcattacatctaggtaaatttttctttaaatttatatgaatatgtgaagactaattattaaaccactaaattatggattaggtcatttgattccatttattttcacatgctggttgcaaaagtcgtttaacgtgccggttgtcataatgttgagtgacgacgagaagttcgtgtttagggaggagttggaactggaaaatgtacgtaatttggccctagaaaacgcaaaggatatcattgcagttggctttgaccctgagctcaccttcattttcagaaacactgactatatccagcacctgtacaaaaccacgctaaaacttcagaagaagacgacatttaaccaactcagaggctcatttgggtttgactactcaaccaacgtcggaatgatttcctacccactcctggaaggagctgcttccttcagcgagtcattcccgaatctcttcaacaataaagaagatatcatgtgcctagttccacaagtttgtccctacttattttatattactaatttcactaaatacattagatacattagatacactagatacactaaattcaataatttcaataattttaataaaattttgtgtaaatttttttagggaattgaccaggatcctttctttagattaacgaggagtttggcacccaagttgggacttaagaaaccagcactaatccactctaaattcatcccgtctctactgggaattaaccaaaagatgtcatcatcaattgagggctcggcgatattcgtaactgacgacgcagaaacaattaagaagaaaatacacaaatacgctttctcaggtttggaactctcaagtttacttatgctatttagtaaatttaactattactattctagttagtaaattaaactgttacttatgctacttagtaaattaaactatttgtaaaattataaataggtggtcgtgatactgcgaaagagcacatggaacttggccctaacttggaagttgatgtgtcgtatcagtatttgaactttttagtggaaagtgacgaggaactcgaagagattacccaaaagtacaaatcaggccagatgttaaccaacgagctgaagaataaactggttgagatactcgtcccaatcattgagaagcatcaggtaatttttaaaaatttaatgcgttttagaaactgaggagtcaagtcgatgacgaaatgcttaagaaattcatggacccgaaccgtgaatcttttaaacaattcttcaactaattttatactccttaaatctattttatgtattttgtttaaatttagaatttcaagtgataaagggataaataaatctaaaatgacaaataatgatacaaaagaatgaaagagtataagattatgaaaattgtatgtttgcattggagaaatctagttctggatgagcctttttgaatttttcaagagcctcgtattgcttttgctgatcactagttggaagtccagcagctttcctgtgctggtcgtagagcattttctcaactgtgctcctggtttcagtgtccaaatcactcaatttgctattctacacaacaatattcacataacacaagtagtatagtaaaaactgtgtaaattaagtgttaactggtataatacgatatctatatactcctaatactatatatcccagaattgtgatacctctggaactatttttttgacgtcgatttcagggtggcccttgatgacggtgggccaccagttcatcttgttctttttttcaagggttatttggagcattctattatcaacaaccgtccaaatagactcgtcgttctttactaaatcatacaagtctccgcctaatcaatagttataggatcaaaataaagataattgttagtattagattgggtatgttgatggaagtgattaattagtaaaatatgactaactgggtaaataaataaaaaataatgagtaatgagtaaataatgagtaatgagtaaataatgagtaatgagtaaataatgagtaatgagtaaataatgagtaatgagtaaataatgagtaatgagtaaataatgagtaatgagtaaataatgagtaatgggttactgaagagaatttggttattgattttgacagatagtgagttggtattgatatcaactttaatgcttttgctgtaggtattctgaggtaatttgactgaaacttccaaagagcttaaagtttgagtccactcatacctaaaaatgtaatttaattagagatttaagtaccattcagttttaccaccgttaccgggaggtggtgacgagtcgtcttcatcactatcctcttggggtgattgttcattatcgtctgccttatccttgtttttaacagtgctatccaggggttttacagaatctgaggaggaactgggttttgtagttgtatctacaggtttcacagattcagctgttgtggttttggggggagaatctactgattttagaagctcagctgctctagtttgaggagaagtttcaggagtggaaaaaacaactgaatcccgggaaggggaagggaaacaagaagaactggaagaagtttctgataaagattcagacctactatcagtgaatttagcgtttgttccagctctggttctgttacttttagaatgataagattcgtcaggtaaactgacggtcttcttcaaactgctcttgagttccgaatgtgaactgtgaggagtggcgagaggagtagtgggagcagtgatggaagatgaggcggagtatttcttagaattcacatttttgttaattaattctgaatatttcataccaatagttctacagtgataagaaaccaaattaacgcagtgatcaagagaagattcactagtcttatcaggtggtctgtaaaaatcagtttttctggccaaaaaagagaaaaaattctccaaaagcttctcgactccgcctgaccgttgagtcaacaacaacaataaattgtctacaccttcattattctcagacatttctattttacaccttctatacaatacttctataaattttcgtaaattgtatttctaatataattctaaataaaattactctagtaataataatgagtttaaaataaattatttaagaaatggagaaggtttagacgaaaaaatggtggatctaagggaaagtgtagtggtaactagtggaaatcagtaaacatttaacacaaaaaatatttataaaattataaataagcttattaattaaattatggataaaaaatagctaaattaagcataaaatatattagaatatggtagaatatagttaacatagaatgagttgaaattattcgtgtttatagttgtgaatgtaatttgaaagaatggaatcctcagcttctgagtcactgctttccataaacccccaaataagcttctggttattaaagggaggtttaatatattcctcaaaattatttaaaactatattgggatctttttgcaatttattatagtattcgagaacattttcattattatcccttttctcctgtaagtactttatcagggctattctgtgtaaggtcgtgttccctaataaattgtacttgaaaccgaacttattttccatatgctcataaacctcaacagcatcagttgatttaaaatcgtcgaataaactataagctaattcccctgaattgtctttaaaatcctcagactcgtcagaatcttcagaaatatcctcggaattcatttttgtttccctcaaattgagttaaattcttcaacaaagtgtgtaattcaatgtgtgaaagtgaaactgctaaattgggcataaattaggagaaaatagtttaaataacactaaaaattaaaaataatttaatattgtacattttaacatttgtaaagtttaaattaaaataacggtgtttgaaaaaaataacgagattctaaacatgtttgaagttttaaaaaattaaatactttaaacattttaaatgcaatgtaatagaggtggaaagatcaataaaaatagtcattttttagatttgagcagggttttttgtttgaaatggggatctgaaaagttttagctgatcatgtaaaagcatagtatgttttttactgatttaaactgctttcaagcctttaaattgttgtaaatttcggtattcaattaccttacaaatcatcgtagcccttattttccaacaacttgaatttttgcaactcgtcactctgttgcaaaaattctctatttttaaactaattttaccatttttcaatgattattatcaaattttaataacacatatcatattttaaagaagtaggataatttcgattgttttaaagaacataatgaatcatttatattcagttgctctggaaggaaccgaagaagaaggtaatgtttatactcaaactctttctaattttaatgtttatctaacgattgatagatttagtattttctaattttttattaaaccgctaattgtccatttatccaccagttattttaaattctgttgatttgatattaaactgataaataccctaggatatacgccagtgtatcgtaatccggattataaagacagattactatcctgtgaagactatttcgatggtaaaatacaaacggggtaattgtttattcagatatttagtgatataaaacaacaattcatctatgatctttgatagatgggacatttttaacagaggactaactttgagccgtaataaacccttcctaggaagtcgagtgaagaacgctgatggtacttttggagagtttaagttcatgacttatggggaggtggaggaccagattaagcactttggtagcgggcttttgaacttggacaagttcaaggaagtgttcgttaaggaggagaaccaaatggttaaaatgcttggaatttactcacaaaacaccgttgaatggctcataacagaacaagtctgcaacggctacaacctgaccctggtgccactttatgataccctgggagaagaatcactcttatacattattaacgttacaagtaagtgttatttaaaatatttttatcacatttactataatgctaaatagtattgaatatttaaatactgttgtacaatattattgtttgtagaattgaatgtaattgtgtgtgattacaagtgttctttgaagttgcttgacttgttaccaaagagtaatggtagcgtgtcactagtagttgtaacaggcgttgatgaacttccggatcaagtcactgctaaatcacagtcattaagttcagtcacctttaaaacgtatcaagaagtggtaaacttcggtaaagaagatccactagcgttcacaccctgtacaaaggacagtatcggaacaatcagctacacctcaggagtatcaggcatacccaaaggagttatcgtaaaacatttccaacatgcatctttagtcgtcatcgttaacagaattggtatctttacactaacaatttattacactattataatactaactacaactaactatagcattaactatattactataataatgtcgtagtgtgtgatcttgagaagactcaattggagaatccgaaggtccatctgagttatttaccgctgtcgcacatgttcgagcgactttacataggcacgagcatcatcgaagggagcgtcattggtctgttttccggagatgtaaagaacattctggaagacattaaggcgcttaggcccaacgtgttcccctcagtgccgagactatacatgagaattcacgacaagatattctcgacagtgtctcagaagtcgtttttgataaggtcacttttcggcttggggcttagtcgtaagctgaaaaaaatcagaaaaacaggagttgtaacacatagattctgggataaaatactcttcaacaaattcaacacactactaggtattttaacacaagccaagatagtatattattactactaattcatattatatttgtactaaatcattattaggaggaagggttaattggatgttgactggctcggcaccactgtccccaaagatatttgataacattcgagcgttgttctccattccactcgtttcagtatgttttaatgatataaaattgtttttagggttatgggttaactgaaacctgtgcaggagcatttcatactgaaagatatgagcctgattccacacacgttggagggccagtgccctgcatggaattcagactcaaatcattaccagactataattattacacaactgacaagaatccaaagtattacactactctatagcatagaatacagttacaaatgataaatttagttatctatacagttagaaatggtaattttagttgtctatacagttagaaatgatagatttaattatttcgacggttaaatgtatgataccagcattctgtgtaaatctggagaataactcttttgcatatgtttataggggtgaattgttgttgagaggaaataacattgtgacttcatactttagtgatgatgttacaaataaggaatcattcgacgagaacaaatggtttgtaaatttttgcatatttgtatcaggttcttaactggagatattgcggaactgttacccaacggagctattagaatcattgatcgtagaaagaatatcttcaagctttcacaagtaagaatttgttatcttatagtttctttagggagaatatatatcacctgaaaagatagaatcgattctcaacaccgccccaatcctatgccagtcatacgtcacaggaaaatcacatttcgtatcacattataactactcagatatacacatatttagttaactattaatgctatacctatattaaccataatatattatattgtaaatagtataaataatggtaaatagtatattaagcgtgttgtatagttaaatcctgtggctgtggttgttcctgacgaattggaactggagttatggtctaaacgatacggattagcaaatttggataggaaagaacaatgcgaagtcaagcaattaaaagagttcatagcaaaagtatattctactcatacttcattcattctatgattatttatattttccttaattaaccatacattacccatatattatcatcaacattgtataatgtgtaattattaggaaattgaaaaggtatttgagaatagtgatgtgaagggatttgagaagattaagaacttttacgttgaacacgagttgttctcaattgaaaataatttactaaccactacaagtaaactgaagagatacaacctatcaaaagtgagttaaaataatataattttaattttagaaatatgccgaacaaatcgaccgactgaatgatgaatcttaatctttttgtaaattatgtttatgatattttgtaaaattagtaaaatttggtaaaatatagttaagggaatgttaaggttaaataatagagtgataataaggctgtttggccaggattcatttaactttttacaaggcttaattagcagtgatttgagactagttaaagcagatgaaacaaggcccgcgctgttcttatcagcccaggggcacattgtggcggaatccctaattttcacacacgagggagattattacctggattccctgaaaattaatcataacaaaatattaaatatcattaataagaggaaattggcttcaaaagtgcaaactgataccactgaatccgaggtgtacgtaagcacattggattccgagttttacacacattttaaaccaggaaaaactaaagaaaataaaaaccttattaagcttttggatactaggaatcgattattcggacatagatactactggatatcaaataatacagtttgtggacttgatcaagttgaatcaaataagcttggtaataataacttggataaaaatcaagagaacttgagtgtgtatgacaaactgttgctgatgaataattatttgatggacttgatgatgaatgaagatgggtttgaaaagtataaattgatgccatttgacttgaatcttcagaattttaattatataagtagtgataagggttgttatgtaggccaggaaattattaatcgcattaataataaggtgttaataaataaatataaactctatatagcagtaagtgatgaccttaaaaatcaattgaaaaatagtaataatagtatggaaatgagttttttaaaccagttacctcttttaaactctgttcaaaaggcttttagtggtaatttagaaaatggtataaattacaattttttcaaaacatttgaaaacttgaggattgtttcaaatgataatttatcattttcacctgatgtaaaagagctaattagtaataagaggctaattccaatcctgtttgataacaagtttggttttgtactactaaaccgcaacatacacttgaaaattttaactgttgatggtcatcaatacacactttataatatttaatgttctaatatgtataatgttaatagtctggaatatgctgattgagtttagaattatgaactgtgtaaactattgtttataaaattattgtgtaaaggtgtagtctcatttttttctacgtaaaaacctataaagtagtagtgaaccggacccttgtgaaatggcatatagaccatcgagaaagttttggaaattaagtgtgagtaagtagtcggaaagcaacaaatagacgagtaagtacttgtttttagttttaaaaagaccatagaaaagaacctctgcttcagggttactaaaacaagaaatggcagttaaagaacgagaaaagaagttaaaatcgagaatctggtcaaaaataacagaataaacaaaagataaagcagcgttcagccaaaaaagctcaagagtagatttagaaccggaacgaaactctaagtccctcatggttttgtaaagactgagtatattcagtaaagcgtatccatcaaatttccgaataagaaggagattcaagaacatctttacggactccgtgatgttcttaggaggcattttatgaggtaatccagacaaatctatgcacttcgtccaaacagcagttgaaagacataaagaggctccagtaacggcaaatgaaacagggtaactcttaacttcatttatagcagtgttgtacaagtctttaagttttaatttcgttgcgttcactaattctttacaccttctattattaaaattttgctaaatcaatatataaataagattataaatactttaaagctaaaattaataagcaaataagtgtaaattaatagttaaataaccgattttaaagtctaactaaaggtaaaaaaaatacaggaaaataattgaaggttctcttattatccaaaactgtgatggaaaaggaactgcgaatctaaagtgtgtcgattgtaaattataaacttacagcacaaattagtattaatagaggtaggtatattgttaattttaccatttagatgcaagattctaaaatactgccactcacaccatttagtactaaagtaatctaatttataataattaataaacggtttaaaacaattataaagtgtgttaaataattttaaaaataataaaatctattaaatgaataaaaatttaaagaatcttctggaattgataacagtttccaaaagttaggattccaatggtgtgtataattaataccaccatttatgaattattattaattattctagattattgtttagattaaataaaatttaatttataagataaaagtgaaaattatgaaaatgtgtaaattataaagcatattgaattagtaaaataaaaacaataattggtctattgaatttttatttttattttgaaaaaattcagtaaaatatatgtctttatttgtatagtattggtcctgccgtgtttgtgtttagggagtataatatgagattgcaccctagtggtaaaatgctattgagtgctaacgccgttgtttttttagaaggttaagtaaaagtgctcggaataagttttatttaataattttttgtttaaattatcgatttctaatatttaacttttgatttaacactttctcatccgacacagttgagtaaccataacacttttgtacaacgttccacaattgatcctgagaataagtcacaattgattcaaaacaaatagtttgaataagattttaaagatgaaagcatcgcaaagcgttttgctcattgcgtttttgttcttctcacagtctctcgtacacaccttcaaacatgacaactatgtcgttgatactgcctttcttcaagataacggtatcattatcttatctaataattaatacactattatagaccattaactgtgtgatattgtattattgtagttataatagtatagtatttattaactgtataccaataacagtgctgtataatatgtaatgtttagtgttggatgaggctaatgaatttagtgaattattcttgtcagagcttgaggtgtttaacaacaacgtacttgaaaagttggcagatcgtcttctcaccatcctcaataaaagaggcgttgacatgaactcgccagccaacgtaaagaatcttttcaattttctccaagtaattttcattactttatatcattagttataaagataatgcatagttttgtggtataagttatatactagtgatgaagttattggttctaaataaatgtttagaatgctgatttggttgacgatgaagaagaagaaaagccaaagtctttcaagcagaagctatggatgggtcttaagaaggcagccaaagggataggaaaacaagctctggttcacgcaacaaaggtgttagtgggatatggagttaaagaaggaatgccggaacttgaaaatattgtcaaaaattcactcacggcactgcctgtgaaactcaaagttgccatagccccgatagtctacaccttgttcaaaaacttgttcagaaaggccaaagttagccctccgccgggcttcaacctaaacgagattatactccacggactcaacgaacatgatagaaaaattgctctgaaatatatgaccaatggtattaagaagctttaacccaaacacgccgatttaacctctttactctgatttaacctctttactctgatttaacagtataaaaaggtatttaatcacttttagaaggatagatgaaatgcccgtgatttaacccaaaacaaggatttaaccaaattaacatgatttaaccaaattaacatgatttaaccaaattaacatgatttaaccaaattaacatgatttaacagtaaaaaaaagatttaactatttttagaaggatttaatattattttaacccaattaataaaataacccctagagtgctgaaaaattaatggtgttttatattcattttatacgttacatagtaaattgttttaatgtcggaagcgagggaatctgctaagtcctacgagagagttagaagtaagtttacacttttatttacacaaatataaattaacaataaatgtgtagaatatttataaatataattttttagatgctacagctgtagcggctggatatttgctcttttctgctgccgtttgggccttttttactagtccaaggaaacatgaatggtacatttttacccattaataacactaattatacgcattttcacaatgattatcctcaatttactgttaatttcaatttaatataatttaacattaaccaactattctattattgcttagggttgatgtattattggattacgcaaatcacagaaggtcacaatatagtggcctttggtcgcgtttaacaagaagattttaatttctataatttacgaatttttatattttataatttataatgcctaataatgttaatgttaaggtaataaaaaatttattgactgtgtttggtaatttcagaaatttaagggctaaaaatgataaattgttgaatattcataagattcctaattactttcaaaactacactaaattaactttatatttcggaggttaaatttaatttattttctacacatttatatactaattaacaaataatttaattattttagattggaggagaattgagtcagactgtttgtacttgagagataaacgtgattttgataatttaactgttttatcaaagatttcaaaccgaaactctgttaaccataacttaaatcttgctgatgaagggttagttgagtgttctggaattcttgaaaattgtaaattcgtctatttccctaatcataacaacgtaaaagaaactgaaagtttgagtctattggtacctctagacatatttcactcagaaatgtacaactcaactgatgtaaattatattaaagacagtaaggaatttgttacacatttgaacagtttggggtttaataagatattactgtgctctggtaataataatgtatataatttttatcataatttattaaaatattatttgctatgcggttatttatttttaaaatttatgtaaatttattgaaattggatgttttccaagttaataaaatgggttaaataggaattttgtcgaatttggatattttccttttaaactcttcatgcgcttgatcccaaactttactaaattctgaattgtccacaactcttatctcttccaaatcatcctattaaactcatataaatatttaaattgtattagtatgtgtaagtgataccttgaatagttttggccaccatatgaagcaatcctgaatgtcaacatgtttgtgtacattaactttaatgaatttacaagtttcaaccctagtgaaatataaaggacactgagaattcttttccttattaacggagtttgaaaatgatttcaaggcttcccagtcaacatccagggtcacaatctcccagttccagtaattctcatcctctctaatcttactataaaattccttagatagtattaactcagctgacttgtccacattattccccaagctattataattgtttgagctgttattgtatacttttattgagcaatcatcgagttttacttgaagtttgtaatagttaaagttaattaggagaaggaaatttacttcatatctatcttgagtaaatatgtgagaatttactgtcactataccgtacaaaacccttttataccattctttatttaaatctatcttacaagcattgacgattgagttagtttttgaggataattgattagaatttgaattattagccttgtttacaatggagtaaccctctttctgtataactacttgctggtttttatttaacttggtaacattgatcttagattcctcgccatcgtctgaaacctccaatttatcccacttagaataatctatcgtcatattctagtcttcattatttaatttttgactgaaatgtattaatttgtggaataaaaaaatatttaaagtagccaaaatagtaaaattgttgttgacgttgaaatgcgataaattagccaatttattaaaattaacctacagattctttaaaatcctgaatatttaagtaattaaaagctaatgtaacagagaatttgaagaatttaaaaataattttaaaaattggctaaggtacatcttgggtcaggtataccaagatcacataagattttttagatttatgtttatttaaaaatttttttaacatgtttcagaggttcattttttctttgatttttctaaaattcttttaatgtgttgctttgcataggttttatcgtaccatatttaacatggtatttaaaaatcagactttaaaatcacaaaatatactacgttatcatattaataaattttttactaaagtgtaaaatataatataaattttccgggaaatgagtatttatcaaagagaggaagagctagatagactattagtccagctgaagggacttttaataaagtacgagagccacagttcaagtgctcagagtgacaaatacgccgaaggtgttttaatttacgagagggtgaagtgcgcagaatctgcctacgcgaaagaaattgagaagctgcagcaccaatctaagggatcgcataatctccgtttacaggacaaacagaagcttttgagtgaattgaaattcaaattagatcatttaaagagtctcgttgaagccaatcaggataagttatctgataaacatgctgatcctaacttaccttacagtaataaacttatcgtttggggtaatgaaattcaagataagactcaagtacaccttattcacttctttagtcataattatataaaatgctatataccgtaccataataatagtataataatagtataattgtataataatagtgtacgatatattttataattccttataaatttattgtttaaaattgtgtaggacagtataaataggatacgtgatttaacgatagatagtgagaagattggagctgatgtaaccactgatttggaacagcaaaacgagagtctaaacagaatccgtgttactattcacggagttgacgagaacttggcagctgctaaaaacaccgttaagactattgcatcggcaatcgttagggataaatgtaccatcatcctcgtcgtcactattattctattgattgtatcaattggactttgcgcctactttttcagggacattaaaacctaatttactctaattcacactttgtaatatattttaatctcaataatagtcattgtagcacacttttagtgtatatactaaacactaaatatgtgtaaaaataattgtatacatataagtcttaagtatattaatacaaaatactgtgtataaattgtcaacgacattcaaagaaatccgagaggtatttaatgatccagaggggtagaaactgatgaaataatttaataatcacgtaattctcaatcttgtcctcatcaatgtgactattggcgtagtaaaagctgtcatgggtgtttaattttacgatgtaattaatagtgttaaagaccaaaagctcgaaaatgttaatccgcttcatctgctgcacatcgtcgtcatccaaatttgaggcgttattcacacagcaatgagctgaatttgtataaaattcatgcaaagtattaaatttgaacaacttataattgtagttgttctgctgcaaatgagctgggatctcatttaaaaggtgtcctagctgataattatcagccacaaacagtttaagaggcagtgaggcttttagggataacatgaagtcgtggatgccaaccctcttgttcatcagtatcttgttatttaccatattgatccactttaggttcaagcacttgtttagcaatattttgttgaatttactactgttaaatatttcatcccacatgtttatcttcctgttgtctgttgaatttccagcctcattaactgtattcgtgttaaccaggtaactgtcatagtagttttccaaaacaactgccagcttattgtattcctgggcattaaatgaattgtgcgaatttgggttatatgcctcaaacgctgattctgaggagtctgaggtttcaaaatcatccccagttttttcatcatactccaccccgtcagcgaaactgtaatttttgccactatccagaacgtttgcacctgagtctagagttgaatcttcaaattttaaacgtaaatctttactttcctcatcaacaaaagcattcacattcgtattaatattaattgtaacactagttgagaaagtttcatcctttttacacgtagtataaatatttttcctagtttcataggctgatttgtgcttttcatttgaataattttcactcttttggtcatttgggtgtagaagatacagatgatgctggatgaatttatgataccaaaggtacgataaaacggtaagggactggttgagtttaacttcaacgaaattgttatatttgcttattaaatccaggtacccaactagtctgaaaggctgttggtcttcttggtacagatttgagttaaagtacactaccattttttctatatttatcagattcactccgtttccaataaaactactcttttccttgtgttctactttttctgagtcaccgcaagggtcattcgactgttcgtaggagtaatctgggttatagaaagtcttggatgatttaaccagtcttcttccattcgttgcacaaatatcaagttcccaaacctcacccttaaacaacactattctttcatatggtatctcaaaatacaactaaacccattgttacgttaatattagtcataatttaataaatataagtagtataagtactaattatgtaaaaaggtatgtgaatgttggatcacctctgtgtcgtagaagagtgttaatttgagccttatggtttctgtgattgtgattttgtaaatcccctgcaatttgttgatggcgtaaatactgcatttgggtcttgattctggcccatcactaagcatttcaatgcatttgatacatgaagatttcagtatgattactagtctaatgttctggtcgattgtttttgacgttaagtttgacaggtcatggttgtacttgaggatgaagaggtgcgatttcttgaagaatgttggtatcttaagattaaacttcttgaggagattggtacagattttattaatatcttcgtggatgacgaggtcgcattcagggtcaagtttagtgttttggtagttgattattatcagcggagagtcatattttctataatagtcatttgaggcataatggcatgcaggctcaatgtgtaaacttgagcccattaccaggtgtaagtcagacgcttctgatttcaacttcgatatctcctcgtagtaggtctcgtaacagtcaaaccaatcaagaaccacatcagtcaaaacattcaacggcggaaacgtacataaacctacacaaatacatatttttaccattataatattattattggtattaagtattattattggtatcaagtattattattggtatcaagtattattattggtattaagtattattattggtatgtagtattattattggtatgtagtattattattggtatgtagtattattattggtatgtagtatcactaggtagtgtggtttaataaataactttagtgtatagtatgagcataccgcaaagatcaccggttggtttgaatgaaatggtgggtgagacatagtttctttggtatcgtttatgacagaaaagacaccgttgcacaaatacgtttccgtgtagttccgataatttgtcaaaaggtatccctgaggctgcgtgcagaccatcgacattttgcgttattatatattttattttcttcctccgtaataattccagtaaggacaagtgtgcttccgaaggtaacgctaatataaactccactatcttcctcttgttattaccataatatacataatcgttctcctcctgttttacactagtttcctcatcttttacagggtttaattcagtttcctcatcttttacagggtttaattcagtttcctcgtcttttacagggtttaattcagtttcctcatcttttacagggtttaattcagtttcttcattctttaaatagtctggatcgcatgaacttgactcattttcagtcatgtcagatgggttaactaaccccggtgacgagttattcattgatggaatacatgctgaatcagttaacttcctccttctcttagactttgttagtgggccataggattcatcttgtttgtctttatattctttggtcttgatgttatcgttattactacttgtattgttcattacagtccaaatacccgttggaccgcgaaaatccggtattccggaaccggtggaaactccagcacctaatattcatactaagtgatagttataaaacgtatagttaacactggatatgtaaattgaggataactatgttaattgtgtgtagagtgtttaaaataccggtgtgcacgattgtattgttagatttggagagatactcatagagaagattaactttcttaactacttgcttgtttgtgtcaaataattcatctaagccaagtggccctttattattatttttctttaatctactggcataattgtatgcactatttaccattcttaaaattactatactaatctttgaaacttttgaaagatttaaaagaattgaatatttaaaagaattgaatatttgagagaaatgaaaatttgagagaattgaatatttgagagaaatgaaagagttgaatatttgagagaattgagagaattggaagaattaaaagaaaagaggttttgaggtgatattttcaatgtgtttatggaatttctgtttctttttaaaataatccagttccaaatccttgtgtaaatacgctttataaatgtttttcttacaccctattactgggcaagttatcgaatccttcttattcctaaaaatattacgttaaaaaatgtttaaaaatgtttaaaaatgcttaaaaaatgcttaaaaaatggttaaaatgtgtgtctaatgagtgatttgaaagttacaagaattgtagaaggttgctacgttcaaagatgtgttcgcaggtgttattgtcattacagtacttttgtgtgagtggctgtatgattgtacttcttgaaattgggcactggtctgagaaggttgactttagctcttcaatctgaagatcttcggaatctgctgacgatcttcttcccaacctttttagcgactctgaccttttaccactggtgttgtttaaaatctccgttattattttactgatcttatcaaagttaaaattgtctcttgattcaatatatttgatacctttaaaattattaatatcctagttttagataggtctggacttacccttatctttattgttattttcgaaattttttaaagcttcaatttcggtacataaattgtcaaatatttccttcaacacactgccgctctcttcagtgcctactcagacatataccattatgtatactcatctatatactaacactatttacacatgtgaatattatacatagtttatttttattatagagttgtgtatgttaaaattaccgaaatatttgtgtgcgtatgtgagtgagagtagttgatttgttaagatgtatagatagtcgttgtaccttgaccaggcctgtgtcatgccaaataattcgttttgcacatcattgttttccataatcacatggaataatacttcctatttacacaatcttgaacttttatttttggctattttattactacttatatttcctagaatctcatccaacaccacatatcacgcaattctctgatccaccaaatatacacaataaaatttcataactttaactataaacatttaatatataatatataatatttaatatataatatttaatatttaatatttaatatttaatatataatatataacatataatatataatatataatgtataatgtataatatataatatataatatataatatgtttattagagtttatcatagtagttatcaagaggtggaacatcttcttttaggccctttctgaccctgatttgtgtgataatttcattgagttttgagcctttttcgagcgcgtctccgctcaccagttgccagtggtcaaacacacactgtggaaaggcttgaccgctagttgacgctcttaaggcagtcgtgaacccaaaactctcagaaacgggcaagtacgccttaatctctaccaagggcgttcccgacctattctcctcgtgaaacacatgaccacgcctctgattcaacgtactatacactcctccaaccgcatcctaacacacaatatatcatcgtaataacactactatactgtagtaatataatactttaatgtggtaataacactactatactgtggtaatatactactatactgtagtaacataatactatattagtgtaataacactactataatgtggtaatatactactatactgtagtaacataatactatattagtgtaataacactactatactgtagtaatatactatataaatgtggtaataagtaggaatgtacttgtgggcagttgatatcgacgaggaagattggttcctgaagtttgggttgtgctgttaattggcaggcgtacaggcatctgcggcatgtgggaagtatctgcccagagcctctgtgaatggcgtctgcgtgcattgtgacgtcgagcaggttgaagcgtattcctctcatgttctcgtcacagagtacgccttccttagtggcccactggaacgcgctgttacagtggtccttaatctcagccaaatactggacaccagaagtcatgtcgactagcaaattcggccccgtagtctcagggccaaaacaccaaattttttgagctgcatttttatcccagccgaactcatcggctaatttatttgccctttcctttacttcgtccctgctggttatcctgccgtcctcaatggcctctgataagccttctgcaaacggctcagccttcatataaagcctgttatgcttgtttggacttttgctcaaacaggtcatgtaagattcagctgacacagtttctctgtaagataccacgggatcagaaactgtaaagtcgatctgggcatactcgtccctcagatccttcaggcaaatctcaacatgtaattcaccacaaccagcaataatatgttccccactctcctcagtagtacacaacactagcgggtcacttttacttaacttctttaagccttccactagcttgggtaattccttactatctttgggtttaactgcgactctcactactgggctcacagagtacttcatatctgcaatgttgtatgcattttcaaaggttgtaattgtaccactcttgagaatgtactggtccactccaactaagcagcatgtgttgccacatggcacgtcttggatttgctcagtgtaccttcccatcatcaacactgttctctgcacattcttgaccagtaaatcagttttatcacctggaacgtatttcgggccttgaattctcactttttgccccgttgctactgtgcctgaaaacacacgcccaaatgcatagaacctgcccttgtcactcgtgggaaccatcttacttatgtacatcatcagaggcccgtcagggtcacagttcctaattgcattggcagcctcatcgtccataggccccaagtacaaattctcaactctgtatttctgggcctcgaacggagatggcaaatgactgactatcatttgaagtaaaacgtcaccagccggtagccaaatctgcattactcttttcaacagctgcttgccagtcagctccttatcctcgccttttaactcaactccaatgctctttaactgaggcacatacttttccttatcctcgttaattatattggtgaataatgaacatataggcttcattataaagttgcaaaaggcacgttcaggtgcgtctggcgaggcttcacttagccatgccttcttagttttactgaagaagtgatctccccagaggtaatgcatcatcttctgcttgctgattccgaatttagtgttatatattttggcgaaagtttctatcgtgaaggcccagccgtgaagtcctgaaccgaaggaaactgttcccttttcagggtaaacctggacatcacccatcaactggtcattataagtcgctacaatgacgtttacattctcgatagtgtggaggaaagtggtgtaaatctcctcagggcccatttgtagctctaaaagcgcacggtcaaccttgtttacgtgcaaaactggccttatacgctcacttaaggcttgacgtaaaactgtttcggtttgaacacacacaccctcgatggtgtcgacgaccaccaaggcaccatctgtaactctcaatgcggctgtgacttcacttgaaaagtcaacgtgcccgggcgagtcaatcaagttaatcagaaaaggttgaacacctttcccatcatccaggtcatgttcgaagtacatgcttatacctgtggattttatagtaatgcaacgctcctgctcatccgctctggtgtcggtaaacctcgcatctcccgcgtttttagcagctatgattccagcttttgacaccaaagagtcggtcaaagtggactttccgtggtcgacatgggctatcactgacatattcctaatgttcttgggattacccataatctcacgcatctgatcaactgtaaaatttacctataacacattacaaccctgatacataaagtttattactatactatagttgatagcgtaaattagtattaaaatagtattatagtattaaaatagtattatagtattaaaatagtattatagtataatagaattatagtattaaaatagtattatagtattaaaatagtattatagtattaaaatagtattatagtattaaaatagtattatagtattaaaatagtattatagtattaaaatagtattatagtattaaaatagtattaagaggagttaattgtgaaagataccatttttgtgttttttattaaatcaacttttcatttagggtttaaagacttcgtttagaattgtagattcctactataaataatttataaatttgagaaaaaaataagataataatgatctataacagcggtacgggtctcaagcaatatttccccacaaccaacgttttatcagatttactaatgatttcaggacttataacgaagtttatagttggaaattgcgtaaaactcttgtgtcattagaaaattttcgaaatataacttgaaaatctaatttttgtatcaacacatttaaagtgtttcaagattccactgtaattttatcagtaatctttctataaccctttagtttaaatttaagattaactgatttttccattcagtttgtatatctgaattattttcccattgatgcttataaactttttattcaccggatcgtcaccaattacacaaattttcattcatttttttattttcttatttaaaatgtttgattttgttttaataattttttagtattttgttgataatatttgtgtttttcggagacttctcaacctcattactatttcattatactacaattattttatattatctaatactattgtatataatagtgttaaatattttttgttaaataatttttattgtataattttatattttaaaggagtttaaaaattttttattaatatattattgattccataaataatttaaaagtttgggagaatgcataatggaattggacttcgtactccgaggggtagtgggactaacggatacgtccagcgcagtttggctgtgatgcctgtgaataaaattgccaagctttctcgccagtccgactcgataactcgcccaaagagtaaagttgaccctcagattattctgcacgagaaaaaaagggaaatcgaactcaaattaatggaattaagagcgacgttacgtatttcaatgactgaagaagaggttgaagaggaaatcaccaagcaaaggaaacatatgttaaataatctcaacttaattccgttaaataatctcaacttaattccattaaatgttaacaagtttgttatcccataatttaccctaagttacaattttagtaaatacaattaatattttatcaggaatgagcacataatggcagaaatgaagaataggcaaatctccaatatacaaaatgctcttaaaattaacacaaaaccaacaaccgaagattctcacaaggataacacttctaaacagagtgatgattttaaacagagtgacgatcttaaacaaagtgacgatcttaaacaaagtgaagatcttaaacaaagtgatgatcttaaacaaagtgatgatcttaaacacagtcgcattgataaagatgacaaacacagcgatatcactggtaccacaagtagaagtcttagctatagtagtagaagttatactgaaagtagtagaagtagtagaagtagagaaagatacaagagaagatataaaagctcaagatataaaagaagttatagtagaagtcgtagctatagtagcagaagtagtggaagtagtagctatagtagtagaagtagtggaagtagtagtagaagtagtagaagcagtagtagtagtagaagtgttggaaggaatagaagatataaatccaactataaaaataaaagatatcgaagttacagtagtggcagataatttcttacatgttttattacgttaattttatatcagagataaaaaattgttaattgagataaaaaattgttaattgagataaataatcattttcaaattaaaacaaggttagattttatgaaataaaaatttttttgaaaagagaaggtctaaccacctgttcaaatgtgtaacttgagatatcaatttaaccatcaaaatgaccaaaataacactttatataaatgattaagaataaataaaatataaataaaatataaataaaatataaataaaatataattaaaatataaataatatataaataaaatataattgagggatttgaaagggtaaaattgaaaatggtgagatctgtaaacggaatgtgtgattggaagaaataaaaagatggaaatttcaataaaaattaaaataaaaaaatgaataaatgagtgttaaagtccgtgaggaagaggagaacgtgtttgcgggaagggataaatttccccatatacacagacttttgactttgtgccgttactatttgtttcaagtccgttcttaccagcagtaattagcgttaaattttaaaaatgaagtatttggcgcttggattagtatatgccttggcctcagtttatgctggcccgttactccttaacgctgacttattggcaaacggcaactcaggtcttgccgtacttcaccacgcagcctttacacacaccgatgatgcacattgtgaaaggcgtggaaacctaagatacttacacttggtcccaaatgtcactcaaaatgttctttacgatggcttggcctcgggagcccttggatatactccggttttacacagaggtttgactccaaactttgccaccggggaagtgatgactgaactagttggactctcagactgtaaaacctggcacgtagccttggttggcttctgggcaaggggttaccactattttaggtatttgggaggtgttaaagaaggaacaagatggaacaaattgtatttcgatggtcttgatgcacttgttgagtttgttcggagtaaacttccagtggaacatttcaggggcttactcgcaaagggtgttgccgctggcgacttcatgctcagacttcacgaagtcttcgcccggtcagtttaatcacaaacgctacaaaactgaatttaatctaccattacaaagcttgtctgacaaacttttaccatacctttaaactgtaatgtgatatcaacttatactactactatgttaattacacattaactatttatagttaaattaggagtaagctggtgataaaaaattaatcccgccgtgtgtcgtagaattgaatatttttatttagtttaatttctctgttctttcgagaattaattgcgtcgtcctgaattgtgattgagatgaatttatccctgttaatggagtagaagtaatttacaaccccgtacaaaactgcagaagaaagtgttaaaaagggtaaaaaaatgtaaaagcataggaaaagggaccagttcctcatgtcttcagtaaacttaaaagtgtcattaaagtcaaaactgtcattaaagttaaaactgtcattaaagttaaaactgtcattaaagttaaaactatcagtaaagtcaaaactatgagtgaagtcaaaactgtgagtaaagtcaaaactatcagtgtcaagtcggattttttcctttaaatcgataaaattctccaaatactcgtcaatgactattaagatccgctcgttatgcgatgattttaaatctgaaaagtgagattagaaagacacttacggtgtaaaatctggctgtaatagtagttagccttatgaacaaacagcttatatatattcgggcacttcctcctcaacaactcaactcctcttttatctaataattttcaatataacaattaattaaattatttactaagtaattaatctactgagtaattaatctactgagtaattaatctactgagtaattaatctactgagtaattaatttctgagtaattaatttgctgagtaactaaattatttgctgagtaattaatctactgagtaattaatttctgagtaattaatttgctgagtaactaaattatttgctgagtaattaatttactgagtaaatgtgtaaattgtggactaaactacgttaaaagagaataaatctgagaataggacaaataataccgagaagtaagttgttttggaattgaaagaggagaaggaataggttaaagagttctagttggttgttcatgacgacatcgccgaaggatgcaagttcagccttccggctgagtccaattaggaccaatttcttgttaaattttttaatttgatccaaaatggccaaatactcgccaaactgttttttgacaaatttattaccagttactagcaagttatagtcaagtttatggaggttcaggtaaacacagtcgtaattacgaacagattcccaggatttcgccagatccctgcccttggagaatttaaaactgtttaaagttctaatactgattaaattattgagtttattcctcataatttcagagaaatatacaaatgaagcgtatatggaatcttatagtgcgttgagttgcacatttacaatttttcagccaattaacgaatctaaaattgtaatcgctcaaatatttctgtaaattaaaaaattattttgacatgttagttatcggatggcatattaatctaatttaaaaatgaacagggtgagctaataacagatactaataaatatacaccttaaacatactttaacattaatttcacggcctacaatagaagataaaaattaacaaaaataattatgatcactggtggtgtagggtgagggagaccagaatgttcgtgagatggtggctattttcaaggacgatgggcagatcgacaagtttgttctaaagaaagtagaagatgagaaggctgatgctaagtctgatgagaagactgatgctagggctgatggtaaggctgatggtaagggttctgggagtggaagcagcagggtaaaaatgatcaaaaactacgatgatttaaaaaagccaatgattcgttatctaaatgacgaaagtgataaatcagatcctggcaaatttgagataacagctaataaacaaattactaatggcgaagctggtttaaaaaataatatgaatggaatgaacggtaccgttgggtcgactggcccagttgggaacaatgaggaatttttagatcccatagacccttttgatgacgaattccctaacactaacataataaacgataacaaaaatttgaaccacgcctcaaacaactttaataatgccggtgatttgaataacttgaatggcgctgctggaattaacaggttaaatatggccaatcctaatatcatgaatgttcctaatactatgaatatccccaataccatgaatgttcctaataccatgaatgttcccaataccatgaatgttcctaataccatgaatgttcctaatactatgaatatccctaatactatgaataatgttggtatgaataatgttggtatgaataatgttggtatgaataacatgaatatggcgaataccatgaatatggcgaatagtcttaataatattggcaatatgcctatgggtaatcctctgatgggtaatattctgaatgacactggcgttatgggtattaggagggatgtttttgaggataatttagagcttaagaggatgataaaccgcaacttcgtccaacttgaaaataacattaacaggcaaaacgacgtgattaacaccatgatccagaagcaaaataacctaattaacaccaagctcaacgaaagtagtaatttattaaacactaagctggacgagagtagtaatttattaaacacaaagttgaacgagagtagtaatttattgaacactaagctggatgaaagtagtaatttattgaatacaaagttggacgagagtaataacaggttaaactccaaaattgaggataaaactagcatcctgaacagtaagctggatgaaaaggctactttaattaacattttagttggtaataacaatgtgatcaacgacattctgcagaagcaaaacgccttcatgtacaacatcatcaatgacagcgttttagacaaacttaacaccatcaatgataatttgataaacacaattgccgtaattgagaacaagcacaaaattctaatggaagatttaatcaagagtctgggtgataacctcaccgcagtcgttaacaccgtgtcaaacacacttaacgactccacacaacacatcacaaacaacatcaacaacaacctcgcacacaacgtcactcacactattactcacagcattactaacagcattactaacagcattactaacagtataaacaacagtatggcagatgttaacgataagcttcatgctaatgtgagtgtgttggatgagaagatttccaacaatttgtccagcattaatgataagattaacgataaaatccttaacctggacaatggagttgaaaccattactaacattctagactcggttaaaacctgtcttgataatttggatgatcacatgaacgaggtggtcgacaggatgggtgaggttgaggggaaaatggaccgctgtgatgatcgcattactgagcttgacgataatttaaacgagttcgagtcgaggtttgatgatttgagcgtgaaattgacagccgtagaggataaaattgaggaaattaatgcgtttgctagtgagactatttctgacctcaaggcatcgttagagactgtaaatcagagcttaaatggagttaacgacggaataactgaagttaatcaaagcattaacgaagtcaatgataatgtaaagggaattaatgacaacgtaaacacagtcactgacagtataaacgagactctaaataatagtttcaattccgtcaatgaaactattaacactgatttgaaggataatttctcaactgtcaccaagtcaataaaaactctcaacaactccatcactaatgttaacaattccgtaattacggttaacaattctttaactactgtcaacaatagtattaacgctgttgaagactctattgaaactgttaataacagcttaaattcagttgatggaacgattaattccctgaatgacactcttggcaactccgttgccgctgttaatcagagcattgctgacgtcaacgccagcatcaacactcttgaaaacactgttaacgaggacgttaaaaccaagatgaaggagtacaagaacaagtttaaggacgttgacactaagttggaccaggtgatcatcaagtttaacgagtttttacacactttcaatgacgggaaggaagacgatactttggattctaacgatattcaaaatttaattaacctcctagtcgttaaactggatcaattcaaatcaccagacgataaaagtaaaggtaactcctgctgcaatgacgttcaaaatccttgctgtgatactggtcataatgcctgtgtagggtccaattctgatgatagtgctgaaaatgataataaactcgataaaaattctggtgacagcagttgctctagttttaactcttgcaaccctccgaacattaacattcctgacaaaatctactccattcgtgagaattgttcagtttctagttgcaggaatgagaacccaactactagtaatattccagttgagaataatgtgtttcaagagtatgtctcgggcagtgcctctgactacagggttaacatgttcggggattcctacgttgccgattttcagcattccagggataatcccgccaacgcctacaacttcagtggggtcaccaatgatcatctttacaatcagaatttgaatcgcgtcttcaggaacaacaccatcattaggtatcccatctacaccaataacaacctagaccctggtgtaccctatcctaacagctatgatcctgggtctacctacactgccaacaactatcagcctgttactcatgaaaactactattctggatcttcattcactcccaacactgcgaatgttaactatgttaacatcaacggccagctcgttaaacacaccagagaggtgataagtttacccgagtacatgaagaccttgcattaattttatcaaatttttctacaccatataatctactttttaatctctatacctaatatactacactatacctaatactatattatatataatatatactgtatataatatactgtatatgtacagtagtatataagtatggtactaaattaaggtctaaacgaccactttcaactcctcaacactcttgtataccgttttaaaactctctaaatagtatattagaaccctaatagtactgtattatagtatttatacgactgatttaccgcctataacactcaactcttactctaccactatactatatataccatactatatatagtatattatgtatagtagtaggagtatactagggtatattatacactttagtatacagtaagataacactcattacagtactatttaacacttaatactatttaatacagttattataagcttaaatatgtataatagagtcattttacactgtgttatgtacacctgatttactacccgtaaacccagacacataataatatactatatattatataccataatatactataatatactatagtactaagagtattagtatattatacactattaatacaattattccagcattatacaccaattaacacgatttaacactgtaaatagtatattagaaccctgtaaacagtactgtattatagtatttatacaccctatggactagccaaaaccacaaacccagacacatataatactatactatatataatactatgctgtgtataatatataatatactgtgtatgatataaaattctatggatgtatggtatattagattatttgtttaaaacctaaagaagcgtagcatatctataaagagtgatatgaaatcacagtataatgttgaggctgccaacatgtaatcgtcaacgctgaactggtattttttcttgcctccacatattaactgaacgtcaaccagaatgtatatgcaggttactatcgtcgagaggattgtgaacgccagatacaggggcttaaatggaagcacaatcaccaatattccaaacgataagattatcagtgacaaaattatcgtaaatccgaaccatcctaaaaataattcatcaatactaataatacatcaatactattagtaataatagtaatatggtgacggtatggtaataatagtaatatggtgatggtgaagatacttgtgagatcgtatttaatttgaaatgatgctactgttagtactgagaatactaggactgttactcccagggcgattgatatttccttgagttcatagaagcaggttactgtggctactactagagttaaaagtgtggtttctgccgataggaagcaaatgcacacagttctattttctaataattttggaaatatgatgaaaacgatagtcatcacacaataaacggttgcggatccaactgagatgtatggatgtcgcgtcaagaaatccctgatgacaggcacaaaatacactagtgctgtaactgccaatgtgaacagaagctgtaatactacaatcagaaacacttttctaatgaactgatgccttatataaattggcgtatctttgaacaaatcatactcaggatcatggcctaaacaatctatacaatctatacaatctatacaatttataaaatttataaaatttatacatttttacatatctagcgatgtatggtgttaagtagattgtgtgaataatggattacttttttcaggatctacgcgttccgttatttggtgaagatcagtttcgttgattgattctggcaaatgtatttctttagatcccattttcagatcaacgtcatttttgcttgatttggagaatagatctgaaacatcatttgccgtctcagttttcgccattttaactacgaatatatgaatttacgactgcaactatgagaatttgagtttaagctaaaaaaatgaaagttgtagcaagattaatctaatgtaaattgtgagcgtgaggggcactataccaataacctcatggggaaatccctgtatcaactgttttttcgtaaaatttttaaacaaaatcaatattaccaataacaaactaatgtagtaaaattctagataagaaggtgtaaataaaaatattaaattaagaagagactagtcttaaaatgtcaataaatatggtaatgatatcggtgtaaagtgcaatggaggccaggcagtagtcgtcaacagagtattcatattttcttccgcctccgacaatgagttgtacgtcgatgaggatgtagattgagcagaagagtgctcctactcctgcgtagatcatcctcatggtcttaaatcctaaatagtaaacgagtgggaatgtgatgaaggtgacgagcatgaagcaaagtccggccacgaacacgtatgggatccacgtggtgaaggagtacttggtctgaattgcgaacaacgtcagtcctagcaccactgccgttgtgattccgcccgcaattgcaatttctaccgacttgaagtggcagcaaatcgtcgccaacgctattgccatcagtggcgtcatgaggccgaatgccacaaaagcacccgtagtgtttctcactagcgatggtacgaagctgatcactagagaagcgatgaagaaaattcccaaagataccaaaccaaacacctggtacttaatgaaaaacgccctcatcgactctacatagtacgccaaaagcataaatccaaacgaaaactacaataaacatttattattattattgtatagtaaattatagcatagtatagtcaattatagtatagtatagtaaattatagtatagttgatagtatagtaaattatagtatagtaaagtatagtatagtatagtatagtaaattatagtatagttgatagtatagtatagtaaattatagtatagttgatagtatagtatagtaaattatagtatagttgatagtatagtatagttgatagtatagtatagttgatagtaaattatggtagtattatggtagtattatggtagcatagtaaattatagcatagtaaataatagcatagtaaattatagtatagtaaataatagcatagtatagtaaattatagtatagtaaataatgtgataatgtggaaagtgtataaaaatgtgaatgtgataccaagagttgtagaaaaacaatggtgaagactttcctgatgaactggtggcggatgtaaacgggtgtggtttcagacagtttgtattgatcggaatatccgcctgaaaattagcaagtgaatttataattaaaattggataaattgtatttagtggagattgcgtacctttctcaggatcgtaaaagccggcaacgccggcttcgtcatcaactaccgatgccataatttcctgtttaaaaaaaatcaaacgattattaaccgtcaataagagaatttgtcggcctggtttaaaatacttggcgagttataaatgaaattaatctgatcgaggcacaatgctgcatctagaaatagtgtaccccataaaaaattcgttattatttaaaaatgagctcaactgccataattttacaacgcaccttcgttgaattagtttagatttgtttttttcatctgattctaaaggaatttccgcagaatcaccagagaatcggattttggaatttctaacccttgaaccactagctcactagtccacaaataattaacttatgtttataaaattttaaaaaattaattttaaaaaaattagtaaaaagtggaatcctgagtgtgtaagagttttcaagttatgtccagaacgtctaggctaactgggtataatttagtgtttagcatttttgagaggtttggtaatgtccttcccaagtctccgtttacaaattccttaatataaagccctaaaaattattatcttttgtgcagtacctgcagtcgttttaatgtacattaacaacagtttcgggtgaattaagtttagttttaggtccaaaaccagcctctctcttgtgtcttgggatcttctatgagagatcctgagtggattcttctgcttaattagtaaaggaaattggagcccagtgatcaaagttttgaccatatcaaacgttagtgaaccctcggagaaaattaaacaactgtaactcttgcagtgggtttcaatctcagaatgcaacaaccgccgttctattctacagtttatcgacatcctcacattcttaaatgttaccactgcattgtccttaactttcttaacaactttcttaacatcttcctcaacattatcctcaacattatcctcaactgtgtcagaattatcctcaactgtgtcagaattatcctcaactgtgtcagaattatcctcaactgtgtcagaattatcctcaactgtgtcagaattatcctcaacattatcctcaagagtgtcagaattatccttggctgtgtccggattccctttatgtgaacgtgtgaaataatccttgattagtttcttatctgcgagtgttattttatccttgtcaatttccatattgtggtgatagagtgtcactgggtcggttggattagaatctttcctgtttggaaaatcagcctctgaaaagtcaatggcgtagagtaatagaaaaggatccagagttaagtttttaagttctaaagccgcttttctaccatttccgagattacgcacatttacatcctcccttccagcaccaatcagcttatactcctgagcatttaatatcttcttcaacggtaatccaatacatttctcaacactcattatctaatctcattatttacataaatagtaatttatgtgtaaatagtaaatgtgtaaatagttaatgtgtaaatagtaaatgtgtaaatagtaaatgtgtaaatagtaaatgtgtaaatagttaatgtgtaaattagtgtgtaagagtaaaaaagacacgtgtgtaaataagacaccgtaatgtgtaaatgtgtaaaatgtgtaaaatgtgtaaaatgtgtaaatagtaaatatgtaaaatgtgtaaaatgtgtaaaatgtgtaaaatgtgtaaatagtaaatatgtaaaatgtgtaaaatgtgtaaaatgtgtaaatagtaaatgtgtaaatagtaaatgtgtaaatagtaaatatgtaaatggtaattatatgtgtaaatactatgagtagaagatacgtcggaccgatctaagtaccagtcagtttgagaaatgttacgttgaaacttgttgtagtaaccgataaatgagattttattcctggaaattgttaggtaatattcaccgttagttaaccgaacatagggtttaatctgaattaactgcgcaaacaggagatggttttcctgtaattttttaaaattcctaaacaaaacacttgactggtcaacagtacttaactcccttagaaatatgtccaaaactaagcgctttaacctggtttccaccaagcttagcctgttaaaatgaagaaaatagtctggaaaatcaagatgtaaatcacctccagcctttaacacaatttcattctgaaactttgtatggtttttatcacttaacaagtataaacaaatcacgtaatagtttaaacccttgagtattttattcctgaaatccagcggatttaacccgtttaacacattgtatttgtttaaaaagggagagacactgggtgaagtttcaactactttaaaatgcttgaaaaagtaatgaatattgaaatcagttaagtctccgtcgaaaaggtcatttgagtccaaaaaatcaataaactccaggtctttgaaaattaaaatctgaccactgagatcacaaatctcacataatttacattttgagctgattttctcagcacttctatgctcacttaatatttttattatttcagaattagggtctgggttcacattatttttatcagaatccaattcagtgttatctgattttttactacggacgggtaatttacgtttaattttaattgattttaagttggtaactttttctatcagtaaatccgtacaaatgttacaaacatcctcaattttaacgttcgacatagtatgaagtgattccagccttacaacaaaacaacaaaatattttacctgataaactttaaatatttaataatataaatttcattttcccaatttttaatatattcccgataatgtgtagtaaaattttcatacacaactgtggttatattattgagtggtaatgtagtatgagagtgtaaagtagaaaatgcttaaaaaactaaaagagataaaaaatggtaaaataaaaccaaatcggatattaattgtgggcactaatcctttaatgtgtagtaatctcctggaacaattaattaatgtttatgatttcaaatttctcgttatccccgtaaactccaattccgctaatactcctaaggaatctcctaataaagaggaagaaattctgtatgtaaatcttcctatagaatgtgtagtggcagagagccgttgtagaaatgcttacaagggtcaattattcgattatttcactaatcttaacaacattgatgaggtggtagaggataaatgtgtaataaaaggcgttgattttgtaatttacgtgtttggtttatgtgatgatctggaaattttgagtaaatttttcaaaattaacaggcaatttggatcacttaagattttagtagtggtaggccagaatgaggagttttacacattgattcaggaatctaaaattgaattgtgtgaccttcaaatcagttgcgttttattcagccaaacatcaaatttcagtcaaaacttaacaagacaaatttttcacttaatttttagaaatttgatttaactttttttcctagcacattttttattcatagatttatgtgtagtagatttatgtgtagtagatttatgtgtagtagatttagttgtggtgtgctgagtatggatcgagtaaacagtttatttattcaatgtgtaaagtattttgtggttttaatttattaaaaacaaattttaaactcagtacgatagttaatttccaagattctacagattaaaccaagtttttgcaattccctttttcaccctcaacaccccaaatattcaaatatttccaatataaacgcggttgtaaggtttaaattgattaaaaattatattgtaaaatgagacaatgtgtaaaaatttgttaataatttgttaatgggatatttggaacaatgttgtgaagaaatcgagagtaagaggatatttccctcaaaaaactttggatacaatggaaataacacagtttgcatatctttgggatcggttatattcctttcaaaatcacttaaagggcatccttccgggaccgagccgaatttgaaaacttgtaaaataactctcaaatgcggcatatataaaaatggatataaggttagtgatattgtaacaatagagctggataggggtaaatttaggaatatttacctcaaaaagagagtcaacaccaaccttaactttaattgtaggcataaatgtaaattaacggtgttgaaaaaaatatattttaaggtgattaagttgaaaaaaataagattcaaaagtgttggaaacgggctaaaattagcttttcccctggtaattaacattaattccttcctcattttcaaggtcaggaatttgaaaaaatgtatcaagaataatattaatttgtacttttttattgatttatacgttgacaactgctttatttccaataattatcacattataaagtttaacaattataatgatttggtattactgtctactggtgaatacagtagctcctgccctcatgccgttagtgagaaacaacttgaaaacactagtgatgaaaatttacagctaaaaatcgctccagtgacttcagactatgacacttctaatgaagaattggacagagaggtttgctgttgttcggatggtagaatatgtcataaccatgtggataatatttgtgatagtataagagaaataatgaatatggaaaggctagacaatattggaaaatcaggaatattcaactatttacaaattttgtactatattaacagtgttcccagttgtgtttcctcctctttagtgtcattggtcacatttgcagtggtggtaaatgtgcataattttagaaggcaaagtttaaatattttatatcagagacttaggattagattcaagtatattcccaagtttcacttggttaaattcaataagcagcaagttctacaccaccaacttttactctcaaataatcactcgcctaatgctaataatcactcacctaatgctaataatcactcacctagtaccagtaatcccaaatatgttggaaagagtttgtgtccactgggatcctcagtaatgtacagacatagtgaaatattatcattggaaagaaagaatttgttttttattaaaattccaaaagattttaaaatcttacagttactatacaattcatcactattatctgttacctgtggtaacagggttggtaatacagaattggacaaagcggaaaaaataaatatattaaacgagtactatagctatgaagatattagtgagttggtatacaaatattataatcagttgataaaaagtggaaattccgtatgcttaatgctgagatttaccaattatagtgacaaaaatcaatatgacaaattagtgtcatatttaactgaaatgtcactggaaaatgaatccgaaacatcaaaatctactggaaaacttagtttgaatgtgttgttagaacttttgtcaccagattttgttggactggatgatgagattagatttttgttgctcaaaatattggtcaagaatttgacattcaagaggttaaaaatatttttcagacagtttgtactatatttaaggtatgatatggacgatttgctgtttaataagattgtaaaattagtttatggaaataaacaactttcagttaaattttactactcactctcgtccaatttggctgttttaaagtataaagattactttataaggtataataatttactttgtcccgaggtttccaccctgataaacctgaataataaatttctgatgttgtttacaaacattatcaattcaattaatgacacgagacgcaggtgtgattacaggaattattatcttaaactacttctctcaaaagtgtccgacgacaactgtagaatatcagataataaactgcactttaaaaggtttgttccactaatcactgatactaacttactcattacctcaattgatctaacccgcaccttcatttacaaatccgccaactatccactcatcctctattccaacaccgtcaacaataataatacagttaacaataataatacagttaacaataataatacagttaacaataataatacagttaacaataataatacagttaacaataataatacagttaacagtggtgatacaattaacagtggtgacacagttgacactgatgactctggtgatagaatggtaagagtaatgttgaagtgtagtgatgtgagtaaggatgagttgtatgtggagttgttgaaagtggtgaaattgatattagcaaagtacaaaatagacaataactacattgtaacatataatttaacggctatttttagtaatttgggctatattcagcttttaaattctggttacacagtgtcaaacctaaagttagacgaaaaattgagtaaaagtttggaaaatagctttatagtaatgagcataatgaattatttgtttgaaataggtgatcgcaactatgagaatataatagttactgatgaaggatatttggtcaatgttgactgtaactacatgttcagacgtaataaactgttaacacttttgataaatcacttgaatatctctgacaaacagtgtgaatttgtgactagagagtttaggaacaagtttaagctaatattcaaggcattgaggaaagaatacaagttaatagtaaacttgttgtatgcttcaaatattgacatagcacatgtgttaatggttgaggaacggtttttgttatcatacagtggagatgttctggatgataagatcgaggaggtaatacaattttcacaaaactcacatcagtacactttgatattcaattactggtacaagtttactaacctctttaagtaatttaatacactaaagtacatagttaactaatttagttattcgtattaattagcgttaaagaggaaaaggaaattctgaaaatttggtggtggatgtggaaatttctgtagcataaaatgataccactggagaagcagtaaactgggatctcaaaccttattagtggtcccaaatttcaagtaattggaaagtcgaaacatttcagagataagtatggggatgattacatttggaaatgggccaatgatccaaactttgaatcgatcatgatgtttatcttggtctcatttaaaccatttccagatcattaagagtagtaataaatataagaaattggaattttggccaatattgacacttccaagggcactctatgaacatcggaattacttagaattgtaatctaaatatttacaagactcaatgagttccattgtttccaatgagcttgagcaatttgaaaactagaaagattggtgaatataagtaaaatattgacaagtataccgaatgtagtgtaatgtaacatattttttgactaaataaaagtcattcgtaactgtttattaaggtaaattcgtttgattttggttaatagtaaatttaattgtggtatctgggtgaaaataagtaatttccttttaataactgtgttttatcagtttaaacagatcctaagattgtttcaactaattttacgtaaatttaactgaagattgttttactattttaataaatcttcatgaatgcagttgatggaccggcgaaatgattggacaataaggtacgtttcaagtctgagaaaatcattctaaatatactttaaatacttctagattctcgtaattttatataaatattttaggttttaaatattatacacataaatatctaatcgtatgaattactacaggtgtgactatgacgttgagatatctggaatatgacggtttgtataacttccgcatgagcctggcctgtagggcctgattaagatctttaaattagtcaagaatttattcatttggatagatatttcaatttgaatctttccccattccaccattatttgaccggagattgaattttcttgcattagtaacatgaatgaaaagatgtattataaacataaaattattgatttatattatattgctccagcagtggaaggctctagaatctcttccaacttcgtcaagtagtgataaatcccctgccccttctaatcctagcggaggtcaatcctccacacctcgatctcaaaatcaaacttcctctagttcaacacaatcacaattgagaacatccacaaataattcaactaggactaattccagtgtaaatcaacaaaatcagtcacctaaatctccgtctcagtcacaatcacaatcacaatcgagttcatccataaattctgtaacaactccaactggtacccgatcggatcaatctcaggttaccaagatcacagttgatattgataagaagtcaagtaccaatgagttagagtactccaaaaatgatgaaattcataaatacgctcctaagtctggtcatgtaatcactaaagttaccaatggtagtgctgttatttgggagtccgatgataatgtatattcattaagagtagctttgaacgatgtcagtagtaatcctgaggaacactttttgtccgtacttgataataatggtgcactttaccttttccagaaatcgagtgataattcctggaaagatgtaactgaagatagatactgtctctttaaccttaaattcttaacagataacgatgaagagattgccaaagataaatattctttatgtatttattgttttacctattcatgtgcttttgataaaggttctaaatgtagtaaaattaaatatgacgaccaaattatttggaacgcaaacgatcatactggttttgcgcccataaaagaagtgtatttatacatgattccaattaaagcatttgtgaggggtaataaggatcaatacaaaaaattggaattaaaaaagtcggctcaaccgaatgaaactgttgataccgttgctaaagttaccgatgcatccgatactaaatctagtccagctcccgttgctactcaatcaactcctaccagaccgactaccaggctcaccaatgtcatcgtcgacatcgataagaaacagaacagtaatgagtttgattactccagtgatgaaaattatcatacttacactcgtaagactggccactcatgcagtaaggtaatgcagggcaccagtcttatctgggaatcccaagataacgcttgtggtacgttggtcaggtttaaggaacagaaattactggttatcttacttgataataatacattcaaactgttccaacatttatcgggcaagtggactgatataaccaaggataggtatgatgttaccaaattgaaactcctaggtgagggcgatagtgtgctgaattcttccaactataaaataaatattgtagacttgtcattttgctattcactcaatcaaggaattaagtgtgcagctgtaaaattgggagatgatgttgtctggaaaacaggtgacgatccgaagtttcaacagataaagacgttttttctcggacttgcttcaaacaatttctatgtcaagaacatgtctgatgaaattaagaaaattgattttaaaccgactccagctaccactcctgaggctaaacaaacaactactgcaactattacacctacaacagctactacacctgctactcaaactacagcacaacctcaatcgcagactacagcacgacctagaacacaacctcaatcacctacaacatcacaacctagaacacaacctcaatcaccgacaacacctactacacagcgccctaaatcatcagaagctgaatctttagagaagtatgaacttcctggacttaagttattcacgatgaattcatctaaaaaagtggtagaactaggaaaatccaaatatcaaatcaccaaggatcgtgatgaacatgtatatgacttaaacgacggtgtaaaatgtcatgaagttaagtatcaagacaagactgtgtggaaacgtgagagtaattctgataaatatcctttgtacattgcctacaaaattgatactggtaaatttgttattacatttgaagatggttttattgtatttgaatttgaagatgataagtggaaaggaaaagtacatagcttaaaacaaggagaggcacttccagaatccaaagtaatgaccgcagtaaagtcggcagtcttagacctcaatgatctgcaaaataccaaaatgtatgatatggtacagactggtaatgtacgaacctttacccctaaggaagctgggttttttagtggagtaataaggacaactggtcaagacaaagctgtctggaccgttatttggcaaatacaaggagatttcgaacttgcaaataagatttcatatgaagattttggcaagggaaaacaaatattgattttagatactagatctggcataaagatgttatacaaacccaatcaaaatgcttattggaaagaggtcgctgagcaacctcaaaacgcttttgaaactattggagccgtaactactcaagaagaaaaggttgatatgtttgaattggatatccttaagcctaagtccacaaaagattgtgattatacagaattcgatactgaagaacaacctaaagaagaagaaaaaaaacaaattgaaaatgctagaaaagcctggaagaaaaaagatgatgtaaaccaacaacgtagaccaccaacttttaaatatcagaactatgctgcaaagccaaaaaaggggatctctaacattatagattccgacactatcgaaaaaggagaggatgatgatgatccaggatttgatggatctatttggaggcaagcaaaccttacccagtacgctacccatatatgtttcaggtatacacctaaaaggtgtctggcagtacttctttcatccggtaatttccttctttatgaggaggataaaaatgaagatttaaatgatatcacttcaaaatctagaggtgaattcttcaaactggctttctacaccaaagaagaagataataaaacatatcgaaagttaaaaatagaggaaatcaccagatctctattgaatttgtcgtacatattcacatttgataatatagagtgtcaccgaattacccacgataataagactatctggaggcatggtgtagattctaactttggaacattaaaatcagtttattttcatcttcttgattacaaggtatctgttgaaaacacaagtggtgaaaagaaggaattagatatacagcaggtaaaaaactccaaaattgatgattcagatcctatattacaagctcttaaacaaacgacgggcggttccaaagaacaaaaagatagcaccactgaacccaccccagtcattgaagatgaatcagagacagatattccagaagccgatcttacttctctgaatataaacgatacgagcagttcttctaagtaccaatgttctgacaatggaatttataaaaccttcacggcaattcatggacacggatttaacaaagtaacgattccaaaaacgttcggttcagacactatatgggaatcatctggaagtgattatgcaatcaaggttagattaaaggaaaattcaactggtgaaaaatatatggtcttattgttggttagcaaaaaattcaaatttttctattcttccgggaagaataaacctttggcagataatacggctggtaagaagtcttttaataatataaaattgttctataaaaatgaaaccaaatgcatttatgaagaactaaatcctagattgtataccgcagctttatatcatctatcactcggatataaacctaaagaaagagtaaagttccatctaattaaatttggtgataagtatgtttatagttatgatgacaatcaaggatttggtcatatgaagggtgtgtatgttgatctcgtagaaaataatttgtatgttgttaacaccgatgatcaaacaaaggaaatagatatcgagaaaggagtcttaactcaacctacgataactcccgttaaaactaaaccagaaccaccccgtgtaacaactcagcctgagaaagccaagaaaactccagttacacctccagagacaacaccttctgaacctgagacttccccagtaccggaggcaaaggcatctcccgtaactgctccacccactacccttatcactcttaatatcgataacactcagtccaccagtgaatttgactactccaaggatgagaattatcatacatacactcctaaggatgatcatgtgttcagtaaagtgaccgagaaaaatgctgtcatttgggagtggaaagataccatttatgccaagtttgccaggatcaggcctaaagaaaacgaaaaatacttagccatactcctcactaacaattcatttaaactattccatcagtctcatggcaaaacctggaccgacattaccaaagataagcatgatatgactaaattgaggttttatggtgaaggtgacgctgtccttaagtcaacccattatacagttagtattgtagacttatcgtttaattacgcattcaacgaaggagttaactgtaggaagatcaattatgatgataatgtcgtctggaatcactctgatgataagaagtttgagtttatcaagtcattctcactgggactcgtgtcaaataaattcttcgttaagaataactctggtgaacttaagaagatagaatatgagtctgaggaggtaattgagcctgaagttacaaaggaagtttcagctccagttactgtggaagctaaggaacctgagccaaccgaggctgaggaaccagctaaagaggcttcggaacctgccaaaactacacccattgccacagcggaaccagttcttaaaccaaaacctgccactaaccctgccacccttgatatagaaaagactcagtccacagccgacttcgagtactccaagaacagtaattatcatacatacacccctaagtctgggcattcatttactaaggttaccgaaaaagagaatgttatctgggagtgcaaagatggcatacctgggacattagttagaaagaagaaggatgaattttttgttatcctactccagaacaatgattttgtactatttcaaaagactaagaaacagccatggactgacattactagccagaggcacaatgttactgcactgaaattctatggtgaaaatgacactgaactatctacgtctgactatttagttaccgtgtttgacttcacatacagagtcacattcaaggatcaaaacagctgcaagaaaattaagtacggagatgatgagatttggaaatataaagataacgcatgtaagcactttgaactaggtcttgtttcaaacaaattcttcgtctgcaataatgaaagatcacaaaacaatctaaatttcaaaggaccgatcattcctcgtgtacctaaaacgacaccagttgaggtaactgctgctacaactgttactcaaccaaagacaagtcctccaacaattacgccaactccagctacaactgatactacagctccaactccaaccactacatctgatacaacttctgctcaaccaaaggtaactcctccaacacctgctccagctacaactgccaccactcctgaaccagctaaacccttgcccgttgacaagtccattgttctcgatattgagaccactactggtaccagtcagtttgagttttctgaggctaattatattaagactttcaacgggaaggacgactgtgtgtttgacaaagtgtctgaaggtcccacggtggtttgggaatcagagggtgtgtctggtactatggtgagaaccaaacttttcagtaataatgatagatttttggtcatactactcaaaaatgatacgttcatggtgtttcaaaaaccgtctggtggagtgtggagtgaaatcactggcagtagatgtgacgttaagaagttgaagttctacggtgaaaatgataaagagatcacggcgaaggattataagattaccctttccgatctttcattcagtcatatgttcaaggagggagtcaaatgtgagatggtcaagatgggtgaagaagttgtttggagccatacggatgataaaaagttcgaagacataatgtcattttcactaggcctcgtgtcaaataagttttttgtcaaaaacaggaatggagaacttaagaaactggaacccaaaccagttgttgaacccgttctaactaaagcggaatccgataaagtaactactactgggcctaagccagttgttaaaccggtgaaagaggaagttaaacccccagttcttctgactggtcaggtaactagtgcattccattctaaactgaaactttatgcctcggatcccgttgacagtggtaagaccgttccccttgagtttgaggtgcttgagtatccaaatcctgattcattattatatctcttaggtgatagatgtgttcagctgatatttgatggtaaagttgtatgggaatatacatccggcccatttcctacatctctatactttaaatcatctgcagaatcttcacttttatatttaaactttgatccatattactttgtatatatctatgatggtaatgattgggtgctaaaagaagaactttcacatcgtgcctcagttgaactagatccttctatgtatccagaaaatatcagcatttttactgagaaaacaggtgattcagttactcttgttcagaatgatactagtatgtacaaagtctatgatcatggaggaatctttttatacctgtttagtgacggtgttaagtgtgttgagattaaatactgtgatcacactgttcacgatgcaaaatccgttggtcagtatcctaatagatttatctttgattcaaaatctttaacgtttgagtttgatttcgaaaataagtcgaccacctataggctctctgattccgaattttccgcatccggcgattcaaaaaaattagaaaaaattgaatatgaagtccctggctggattagaagacagtcaaattataaatttgggtccaaattatccttatccgatctcagtatattaacctctgacaacagagatggttcaggcgccaaacgcataaatgttaaaaaatccatgctaagtagtaaaaaatggctttcaggcttcttttatccggttactaaaccatatctcgaacttaggtacaaggataacgtcttcaagtccaccgagtatccctatagaggaaacccaaagatattattattcaacactgatgataataatatatctgttttctttgattctaaattcaaagtgtcattcaattatttagatctatcagacgaggaaacagtttttaaggctaagcgcaaacctacagatcctgatcccgattctagtggtgaaactgagagtgatagtgatactaatagtgacagtgagagtaatagtgagagtgagggtgaaactgttccagtagctgagatagtggttactccgcccaagactaccgtaacgactcctgaatctcaaccacaaactgtatatagtccaacgcctaaagtatccacttcaggtccaaaacgttctcacactaaatcatcctcagtatcaactgaatctaattttaatccagaatccaaagctatttctaaacaagctaagactaaggctcctgtcataacaatcccttctgaacccactgatctaaaatcttccactactctggcgatcgttgacatcgagaagaaacacaacaccaacgagtttaactactaccggaatgacaattttaaaacatacgtcccaaaatctggttatggattcagtaaggttaccgagggatccagtgttatctgggaatctggagatgtatttgcaacctttgttaccactaaaaggaagaaattccttgtcatcctccttcaaagtggtgacattttgctatttcacaagaataatgctgaacaaccatgggaagacattactgctgatagatttgatttgaagaaacttaagttttttggtgaaaatgatactgagattacttcatcccattacacggttaccctagttaagactatcgtggaattcaaatttgaggatggtgttaactgtaagaagattaagtatggagatgataatatttggaatcatatggatgacactgagttcccttccatcaagatgtttcaattcggacttgtctcaaacgatttatacgttcagaatagtagtaatgattggaaaaaattaaattataaaggacaaaacacacctcctgaaactgaatctgacactgtaactccttcagaataaacttgtgattatactcctgaacctaatccaaactctcatactgtataaaatttctaattgtacctctggtttaaaaattacactcatacactcaaatataattcattactcaactatttaaggtcccagcacctaactaaaccagaacccaaacggtttttaagggttctgcataaaatttaaaattaattcacagtgtactgctgaaaatacaattcagccagtgtgtcatgtaatgagtaaaaataactctgtaaaataaatttttaaataagctgtacattagacattgtaatatttgtaatatgagtcacatgtaaaatattaaatttaaatttcacctaaaaatctaataatttttacaatacactttattcattgaattatttaatcttcagaatacgaaacgttttaagaaagaaatatctaaagtaagcccagtaacttctgtgtgttttatatgttatcagcttgtgggcttttgctgggtacacttttccagttataattttcattgtcaaattccttaaaattctttaaattatcaaatttcatcttgtcaaactgcatggaacttttgggagcttttggtaaacaaagctcctctactttcatgatagttttcttaagctctttagaaacagtgaagagttgactctttttatactctgtttcattatcctcaattgtatttggatcctcctgggaattctgaggatttggaaactccacgtatctgaaacatgtttcataaaacttaaccagatatgaataatttgaaacaatggttttcctggtcaattcctggattactcccaatttgtcgtttaaatcagatagagacttgagcgacccttgatttttatcaaattccccttcagagtcaccgcccataagttttacccacgtcattttatcaaagaggtcaaagttagtttccaaagcactaatctcattactcataagattaaaatagagctgaaacaagcagcggtaatattccaccaggctcgtcccatagtcatataatatcacacagaaatcatcgttcaaatcttttatgtcttcaattacttcgttcatcattgtataattaatataaatgatggaaattacgagattaaatcaggttattagatcctcaggtgtctaagacattcagcaggtctagacctcttaaaatcaaagatttatggccaaattaggccaaactaaaccttaacttgaataacaagggtaaaaaattggaaattagtggccagatccacccattaaagttgtagatattgttttaattgttagcttgtgtaacattttctaattattttttcagacttttttccaacttcatcgatttttttcatgagttgaatgaatcttggccttagttgattaactgtttttcgtatttgtaaattaaatcctccatttctctaagttggcctaattttgtctttagtacctcgtagtagctgtagtttccattctctatgttaattctaagtctctgcgcgtttatcttcccttctactaggatttttgtgttatttgccatgtcatttgctactttacgtaattctgtctccagttttgagaattccttcaaatcattctccagatcatctttgtacggtacttcaaatctattaactttataagggtaaactgtgtccatatctttatacggtatttcaattgtatcaatatctttatacgtgcattcaattgtatctttcattattaaaatatctaataaaaattatcagatctaaatggatctgatactataacacttagtatatcatagtattagtgtagtaaatagatgaaaagattaaatatcatttcttaagtcttcttctttatatttcattttatagccttccggctcagtcaatttgactccactactacaaattgttattacataaagtatcccatgagcattatccgggcatcaatttacctaaataattaaatatctaagtagtgtaaagtagtaaataagtccagaagggggtaaataactagaaaattcagtctccaggtgacaaaataagtaagaactaagtagtcagggggatatctaggtggaagcaagcaccgtaaaggagatacttaaaatcatgataaaactgttgtaattgtccaatgtacatttgaactgatgatgtattattacatcgcattaatttctcattcagtaacttatttatattcaccaatacctaaaccatatacatagaagtaatttactaggtaaatatctaagtaattaactgggtaaatatctaagtaattaactgggtaaatatgagtaatctgtgaattacctttttgaattgtagtttataaatgttatgcatgaaataggaagtaatatttaagattgtgatgaggatgcaggggatgaattgtatgaaaatggtgttccagctcgagtttacgacgttggcgtagtaactccaaatcgttgtaaaatcgttctttatacataaatatgataaatataatctcaaatacgatgatagtcttttattatacacgatctcctcattcacgtccacgggatattcatacaactttcccagctccacagtgttatccggtgtcatattctggcccacattagcttcactaaatgtgtcatttctggtgagataaaatttgggaataattaactttgttttcaaggtgaggagagtgatgaaaatggtgttgaagtcggggttgatcttgtcaattgaggcaagtaggcgtgaaaatgaccatacggacttgggattaatgtaaatttggccctgttcgcagcagtttaaaacaccctcgacgattttgaagagggtaaaaattttcaaatcctctgagttacactgttgcaaaagtgaggataaagttttaaaggttaaatcaacttgtttttgagtatttgcaatgctgtttaagcagattttaacacgtttactcaggtcaattctgacctgtttaagctcagaatttgaccttacctcagagtaaatccgctcaaatttgataaacttttccctcaagtcgtcaaaaaataaaatcgtcctattcttcggcacataatcccatgaaatgtcatcaaatttattagcgccaacagttaatttttcaccctgtaaagttaatttttcaccctgtaaagttaatttttcaccctgtaaagttaatttttcaccctgtaaagttaatttttcaccctgtaaagttaatttttcaccctgtaaagttaatttttcaccctgtaaagttaaattttcattgtgtaaagttaaattttcattgtgtgagttttggatttgtttgcgttgattttctaatttctcctgttctatgcgttttttttcaaagttttcccgttcaagtttctgtttttcaagtaattccagccgttgaaactcgttaatcgtctcagtgatcacagaattgtacacatttctcgtggctacacagttttcgtctattaattcctccaactgtttactatccaaatatccaaatttcacactctcccccgtaacatctttcacactctcccccgtaacatctttcacaatctcacccgtaacatctgtcacacttttgtcactaaaattaaccgttttatcactaaaattaaccgttttatcactaaaattaacagtttcaacggtgttgatagtaatattccgtgtggtatgggactgaattagttgaagtttgaactgtgtggtaaagttgtggccggttttgtaaaagttgagtggaatctgaagcttccggtcctcaaccaaaacagattcatcaaaattaaacgttaccccgccaacagccttcatacctcaaattcatttattttacacttaaatattattacactattaaatattttacactatcaaatctattatactattaaatattttacaatattaaatctattatactattaaatattttacactattaaatattttataatatttgtaatattttagaatattaaatctattatttccaacaccacttttccacaatgtcaataaattgaaaattttaacaattttaatattttaataaattttacgaaaattggctaaatttcgagattttgaataatttgacaaaagatgaataatccaggtaattcctcagatcttcccagattccaatattaacctagtctaacagtgtaaatctgtttgtagtgagtatatttgatgatgaggaggggctcgatgacgaacgtgccaaaaataataaatatgactttattccacagtattcaactgttaatataatattacttcaggggcgtgattaggaaacgtggtaattccgagggtgaaaagcccaatcctaaactcagggcttgcatttcttgcagattaatcatgtcagaagatcaggtatccgttacggtgcttgctaccgcccacaattcttactccggaactctcagttatcccttctatactttactatttactgtactatactcttatttactatactatactcttatttactatactatactcttatttactatactatactttatatactatactatactttatatactatactatactctatttactgtactatagtttatatgctaattcccttagtatataaatactttacattgtgatatagttttatgagaatggctgtggcaattgttcgtttttgcagatggacggtgatcacaggcgtactctcgactgtaccagtgcgaactttaacggcttcatttctatcatggacccgcaaaaatcgtggtctgcaagatataataatttaagtatccattacggtgcttggtcacgcggattcagtctccccgaccactccattttctctaattagctaatccactaattatctatagtatactgtgaatatttgttaggtgatttgattcctggatgttatgcgatatcagtgaatgggacactcccagaatcaatcaaagatgaacttctagaatgattttacacaaatttaaccaatttaataatttatttaatgttttaataatttaaccaattatttaataatttgattaattatttaataatttgattaattgtatgaaattataatttgcgtttggataatcgccaggagtcttggtccttctcaaatctattatacaacggctttatcttcacatctgcagcattatcaacagtgtcaatggtaataataatttgtttactggaatgtttggagattgatttcccggttgagatgaacatggttggtgcgagttcgagtagccatttggatttgattaccgttaagtcccgcatgtactccttactcgtcaatatcaactcatgatataacacatactcaggatttctacacattattaccataaagttagttttagaggaaaataattgtaaaaaatgggttaaaaaaataaaatgtcaaaattgatcgggttacgaaaataaattttctcacctaaccacttttgctgctccaaccacttatttaccaaatttaattagtaaaataaaaataaatataaaaaggttgcaaaatgataaataatggggttaagtaggtgatacctttgaaagagtgatgaggagggatgtatgtagactttttgttcgtctagtagtgtgcggtatgactcttcgtcgcgtttagcggagtggtggaagaagccgctgcaaatgcacttttgaatgcgttcagttttactcaagccttcgaatgaaagtttgtcacgccggtgcataaacttgtacttgtccattatcgatatcaactgcttctttatatcttgtacctttatcaacgctctatactacacataatttataacaatttttaaacgggtagttagtagttggtatgagtagtgaggaaattttctatctacattgctgcttcaactacttatttaccaaattttaattgtaaaaagtaaaaaaaataccaaaaaggttgcaaattctgaaataatggggataggtaaataagtaactgagttagtaggaccccgtagggaaaagagagagccattggggtggctaactctgtggaaaataactaaactctgttactacaagccccgtaacggaatacctgtaggaaattattgtagcagtagaaattggagaattggttgtgtgaccattggttataaatgtggagataagtgagatggtctccttcaggttggaagaatttacgccgggattggtcagccttttcccgtttatcactgggacggtaaaatatgttctgcacagacaacatcgatattatcgttattatctcattataacagtccatctctatcgaatacaatagtatctacaatattactgtgatgttgcggtaatgttggtagttagtgaggaaaataactaagtaaattgctgccactatgtactattaatagttgagaataactgaggtaactggttaaaatactttggagagagtgggatcgatggggaattgtgccattttcctgcctaagtgtgtgagtaggccttcgtcgtccagtgctcccaaatgatataatatatccaaagcatcaattaacatctcattacaaggtctataacattagtattattattttaggtttggagttaataggagtgaggaaaatcatttccacattgctgcagtaactacttatttaccaaaaaataattgtaaaataaaaataaaatatcaaaaaggttgcaaattggtaaataatggggataagtaataaataactagtagagatatgagtaactagtggcaggggaggtagcaggtgccccgcagtgacaccgtaacgaacttatccatgaaatcgaaatgtatgaaatcattgattcccatagactttagtataataacgacgttggtgagattaacgcgttggatttcgggaattggtgtgggtagcatttcctcatgaaaagttttctcagtatacagacggaagcattttccaggcgccgtacgaccagccctgccagccctctgcttagcattcgcttgcgatatcggcgtcacaatcaaactctccattcctataaatatcttgtgattagggtgtgaattaccagttttaggattatatgatttgattttacaaagtccaggatcaatcacatataatattcctacacataaattaatactattaacaataatttatgttaaaaatgggattttggaaataattacaaaagttgatcgggttacgagaaataaattttctcacctagcaatttctgctgctgtaactacttaattcggaaaaaacaattgtaaattgtaaataaataccaataggttgcaaaataagaaataatggggataggtaaatagataactgggttaatgggagggatcaggtgccccgcagtgacaccgtaacggataccatcaatagtaattgaggcttcggcgatattggtggcaagaatgcatttcctggttccagggggtgcaggttggaatatttgttgttgttggtcctgaggtaatgcggaatacacgggaaataaaagtaacttcggtatgttcatgctcttcaacttgttcaacctctcctccaatatttttataccagtctctatatcctcttctcctatacataaatatagtaatagtgtaaatggttgatagactagagaggaaaatatctatcaatcttgctgcagtaactacatatttatcaaattttaattgtaaatagtaaaataaataccaaaaaggtcgcaaattgtggaattggtggggatacgtaaataagtaactgagttagtaggagtcctgggacaaaaagagtcccatcggggtggctaactccgtagataaataactaagtgaagaataactaaactctgttagtacaagctccgtaacggaccagtaagaaagagtagaatatcaccgggtttttcattgagatgaatgtttaaaacggtgattaaagaagtttcgaggtagtcaaattcttgttcctttgagtgaaaaatttcaacgggaaatgaacggccgggaattttaaaaatcttcgaattaaaaaaatatttactaaacttctcactctccaatgtggccgacgtcactattaatctaaaatcactcctcttcatacacgtctcctaatcacacagtatagttataattagtataattattgtgtaatagtatgattattgaatgtgcgtctgagagaggtaagaggagtgacgagttagtgtgagactggtacctgtctatatagctgttattcactatatagtcaccttcagtctggtttatataattaactaaataatcacttgggataccttgagaagtgagaataaaacgtcagttgcgatggttctttcatgcgcctcatccaactaaagaaattttttacccaaattttaaaataataatttaattttgtgattttggaaataaagtgcaaaagttgatcgggttacgaattggcgaggaaattttcctccaattctgctgcagtaactacttatttaccaaaaaacaatagcaaaaaataaataaaataccaataggttgcaaattagtaaataatgggggtaaggtaaatagagttaataaataaagccccttcggggctaaagagtcccattgggtggataactctgtggaaaaataactagtatgagggtagtaagcaccgtaacggaatctcaccataatggttgtataatttgttaaaagaggatcatgtagaatttcccttaataacatcccatcggtcatgtatttgataatagttttatcactagtgacgtcactaaaacgtatacaatatcccacctcatcgccaaccgtacaaccaatctcgtcactcacacgcttcgctatgtttatacacgaaattcttctaggctgcgttattccaatcatacaacttattctatttgctttatttactctatcagcagcagttaccgcagcagtttgtacagtaccttctacactatctacagtattatctgtactattatctacactattatctgtggtattatctgtggtattgtgtattaatgtgagaaaggtgtgatagtggtgaaagtgtgattcgtagaggtattgtgggatttgtgtggttttaccgctaccggtttcaccaatcacaatgagaatttggttctcaattatttccctaattatctcatccctcagtttaaatattggtaagcctcttctttcctcctggatactccggttcgttctaggttctcctgcgatacggtgtgttgctgcagtgtgtatagtgtgtatagtgtgtgtactgtgttgactgtgtgaagtgtgtgtagagtgtgtagaatgtgtagaatcgcgattaagggatttgagttcattttgtatttgtagagaagtggtgatggttctctgtaaagaaccctcaggtttagcaactagtttgatcggtgataatactatccctatggaattattatttatcaaatttatgtaataattgttaattagggataaaaaaaaataaagttaaaagttgatcgggttaggagaaataaattttctcacccagtcatttttgctgcttcaataacacatttcggaaaaaataattgtaaaaagtaaaataaatataaaaaggttgcaaaatgataaataatggggatgtgtaactagatgttaatggaggttgtggcaggaattgcctgcatgcaacggagatacccgatcttatggtttgtcctttgagaaaattgggaggatttaagttgatagtgacttcaggttgcggttcctcttccaactccaactcagcctttaaccttgatttttcctcactgcttaatattccactcttcaataactgctggttctcccatctttctatatcatttatatatcgcctcttattattcattatgtcattctcatattcctgatcatcagatttatacttttcatcatatttatccctatgtttatccctataatcagcgtgtgtatgtttatcattgcgtgtgtgtttatccctataattatctttatgtgtgtatttatcagtgtgtgtgtattgatcagagtgtgaatgtttttgtgtgtgtttgtggttttggggtttagggtttggattttctttattaattaattctctagcccattccgataattcaacctaaaattaattatataatccaattttatataaaaatatttattaattagggattaaaaaaaataaagttaaaagttgatcgggttaggagaaataaattttctcacccagtcatttctgctgcttcaataacacatttgggaaaaaataattgtaaataataaataaataccaagaggttgcaaatactgtaatatctggggtaaaagatacagttggaggaggaagtgtgagttccttacggtttgggtcatttttgagtgaaagtgccggaaaattactctcgtcactgttactctttattatcttatcccattcatccacatctacaacatcaatccattctatttaccaaacaatttaccatacaattttaccatacaattttaccatacaatttagtatagtatttactataaaattactatagtatttactgtataactgagtaaaggtgtgaaaatacgttttggaggatcgagtgtgatgatggtgcgatagagttggttgacaaaatcgaagctcatgttagcttcattctcgtccaatagtttattaaagtcgtccagatccctagccttcttcgctaaatatatcacaaactccgctaactcctatgatcaatattatttaccatactgacacagggtatattcaagagtatataactaaggaatacccccgaaggggagctaaataaacatatccaagaaaataaatatatccaaaaaaataaatatacccaaaaaaagaggtaaataaagtatttcccaggaaattgagataatttactaaatatacagagaaagtgagaattttacaataatttggataactagtagttattactggttgatcgatttcgaggtagtttttgagcatttcagtgactttggctagggcgctgagtgactggagctcctctagtccgtccatcgacaaattttcacaaattcccaaatctcctcattaataaaattattataattaatttattcttaattgtgaaaatttttgaaaattatgaaaatgccgtaatacaatatgaacactagaatctcatcctcccatacaactcactaattatctttgtaaattattttaaattttataaaaatttataaaatgatttaaaatttgataaaatgatttgaaatttgataaaattgtcaaattgtaataaatgatttaaagttggaataaaaaatggacgaagaaattttatcgcaattggttcagaatcaatcactcgatgatgaagttctcttcctcaatcctgatatccaagtcgatgatcacaactactcctctgaacacactactcacaacactattggtacagttgagaatactgtgatagaacaggacaatgaggagatagaagagaatactgagataattgatatggaagagatagatagtggaatgataagttggagtaggaagttggaggatgagccgtgttgtatatcagtgcatcctgaattccctaagattcctcatgttgccattggtacctgcggtgacacctgtcaaatctacgactttcaacacagtcactcaaacacaagtattatctcatatattacacagttatcaactatactaatactatactacagtatactatataatatataccccaagaggtagctacttaactatatacccctagagggagctaattaactacttactatacttaactacttagtaatactgtaaggggtgggaggggaggctcgaggaccagtcaatggagtagactggtccgagagcgaaattttttttcttgctgctcttttttccttgcaaccttcaattctgctgctactccacttcctccaatctaccccttacttacccttaattaagtatataattagtactaaataagtaaaattgttaataatgtttagatgaggcgttaagatgggttttgggcccgtttgaggaaactgtttcatgctgcgctttttctcccgacggccaattcttagccctaggaactctcaactcctctctcatactctactctattactcacacagttaacagagttggcactacggataatgttgacactactaacacagtaactacggatagtattgacactactcacaaagttgacacagttgactacgtaatgtgtagagagttggacacgacgttgttgacagtggactggttatgttttagtgtggacagtagagttgtttgttgtagcggcgaaggcggactacttctcatacaccacatacacgccaactccacacagtacattaacacacacctcaaatctcactatggtattatcacctcctatcccactcttaactctggtaatactgtaaactctggtactgttaactctgtagacacactggacactgtagacaatgttactgtaaactctgctactgtagacacatatgtactgatgggagcgggtgacaagttgatgatagtaagtttaaatgagaattaccaacagaaaaatattactgcggtaaactccggcactgacacacgagatactgcggaactaagtgatgaaattacaatagtaagtgcaagtgacagggtgagaatgtgttgttacggcacgatgagtggtgtggtgtcatttgttaacattcccaaggccacggcaatcagcacattcactcaccacagagactccgtagagtcgattttattccctgaaaactctgtagatttgtgtgtcacggcggatttaacggggctggtggtgttttacaatgtgaacacaatgtgcgtggtgggtaaagttgatgtttccagtggtgttacaagggttctcagtagttcactcagtaacaagtttatagtatccacggtcaacggtactgtggcactgttgacaatgaataaaatagttagagaggtcaaattgcacaaggcgccaattaccgattttcaacttttgaaattgcccaacgaggagtacgtcatcaccatcggacaagaccacaccctcacagtgtaatattcttccccagttaacaatgataaattagtttaattatgttaattagggaataattaaataaataccaaagttgatcgggctacgaaataaattttctcacccagtcatttctgctgctcactaattacacagttataacatcatactacactatagtatgagtatagtatagtatagttaggagtatagttaatatggttgaatgatgttgtaggtgtaacatatttgaatagtttacggaacaaatttaatatacaattttaatatacaaatttaatatattaatatattaatttaatgtataaatttaatatataaattgtatattgttaattgtgtagttttgtggccttccaattttttcacaattttttcaaaatattaataaaaatattttttaataattttaaattaattaatttattttaattgtatgataatttgtaaggtattttattgttgtatttggcggtgtagatgagtacaccaaattcacgccataaactcttttttagctctttgcattttaactcctaaaactacaatttctcaactaatcctcacgtcttccaattaatcaaacaatacaaccactgaaaattttatattctacaacaaaataaaataatttaaacaaaataaaataaaataatttaaacaaaataatttaaatgaaataaaataattctgtgaaaagatggtgatgagatctgagagtggttttgacgaggatgtttataggaaggtgttggttccgaacgcttctaggaacacttcctacgtgcagctcgtgaacaactccgcagacttgaaggctttgtgtaaaaaatatgtccccttctggtcagatttggacgacggggagattgaaataagtttaatcaccatagcgttgacgaataaagtttacatggtccgggtccaggacccggaccccgcgtcaagacggctggacaaggtcctcctgcgtgtcatcggcgaggacaagcgagtgttatacaacattgagcatcagaatgaagtgtttaaactcctgagtgagtacgggttttgtccgaaaatgattaaccaattcccgggcgggagaattgaaacttggatcgagggctttgtcctacactcgccaaatttatttaatttatctgttctcacctctgtggccacgcttttagcaaagttacataaaatcattacgaaagttgcgcccaaggagtgggacaggacaccctcactactcagcaaaaccgaggagtggatacccaaatgccatgaaattaacaggaaacttaatctaaaaattgatatccacgagatggaccaactcttcaacgaatataaactttttctcaacaattatttagtacaacataataacagtgggaataataatttggaggtgagaaattgtgaaaattcggaaaaattacgagaaaaaaaaataaatgcaaaagttgatcgggctagccaaaataaattttccacccacaattgctgctatcacaccaacggtactactcacactgttaacactgttaatactgttaatagtaataatagtaataatactgtggatagtaataatagtaatgatacggtggatagtgtgggtggtgtggacgaggagttgtgtgagggtgtgaggtatggaatgagggtggtgttttgtcataatgatatgcatataaagaattttatcgcaacgtatgatgggttaacgttgatagactttgactacagttcgttcaactatgttggagctgacattggttactttttcgttgaaagtaactttgactacgacgttgacgagtatccttttttccgtattgaccggtcacttgaactttcctacgagttaaagaccatgttcgccagtgtatacttatcggagtcactgggctgcaatgtgctacccagtagaaaagatatcatcgatccctttttagaatccgttgaattgttctcaataggcactctcatattctgggcatactgggggatactaatgtacgttacggagcttgctaacaatcacacagcttactcctcaccacttagttattactctagttattactatattactttagttattactatgatattactgtagttattactatattactgtagttgtatggttaggtattttggagtaatggtggtaataatattttgcggttgtatttatattgtgagtatggtgtggaaaatgttttaggaaatcgatgagtggaacgaatgataaatttgactacatcgagtacactagactaaaaatcgaactctttaaagaaaaattcaatgaatttaaaaaacacaacacttaatatacattttacacactatactactatgtatatatattatacctaatactagtcttaactatacccctagagggagctaataatataagggtagagggagctaattaactgtatacccctagagggagataataatataccccaagagggagctatcttattatataccccgagagggagctaaattaatatctaagggagagggagctacttaactatataatcttaactatagtatactatagtactatatataatatactatgtataatatactatagtatatattgtatatgtatagtagtaatagtatggtagtggtgtatactatacttaagtatacagtaagataacacttattccagcactatttaacacttactactcattaatactgttatttaggtatattaaaacactgtaaatagtattataaactatgtaatatacacccaatctactagccttaaacccagacacatataatactatactatatataccatactactatatatactatataatatataatatataatatactatatataatatataatatataatatactatatatactatatatgtgtgtataatattataggcgtccaaatgggttgcagatatctcttaggattttactgattatgagtgtgatccaccagataaacctgtcaaagtccgattccagcgcgtcggtaggccagtgttcatggcgttggtaatacagctcacagtccattaacacactgttatacttgaatccgatgtaagtccagaatacaaatggcacagtttcaagaactctaaaagctgcaattattaaacttatcatcaagtctggatccacaagttcaatcttcctgcagtaattgctggtagattcagctttaaactcctgctcatcaggtgttacaggaccatttctctccactaccaaacacaactgcgtgtaaactagggagactaccgctcctcttaccagagagttatacattgtaatcagtattacggctgggaaactgttcataaaattggggaattgagagtcaaaatgtcttttgaagaatatgcaaaggagtagtaaaaccctaacaccaaccagaacagtaataacacatttactaattgtataagtttgagtacttttaaggtcaattttttcttcttctaagtgacaatttgagtctaaatatgactttccaggaccactctcctcgtcatatgaacgtatccgaaacaggaataaattgtatttccccatgatttcttgcagtatcgctggaatacaccggccaatcaagtcaaaaacttggtgtaaaacgactattaccaacgtcttcaactcagtcttaaaatagggaaactgatccgtcaaatacattactacatcattttcacactattaaataagattaactaagtaaaataagtaattattacgtatggaggaattgaagaatccttcggaggattcgatgatgattaatagaattgcgtatgcgtagatgcattggtacatgtgtagccccttcatccacgttttccaagagttaaatctgcttgctgaacgccactttcgctgcttatcattagatttcaagtggtagtttgacattaccattaggattggtatcccgagtaaaagtagtatcatcatctgatatgtcataaggacatcagattcttgtagaaaacgggtttctctacctctgaacgaattgattttcatgaaaataacaataattagcactaggagatatccaattggtctgccaatttgatatgacagcatcttgtgaactttatttccgggtatgaatttgtcgtttacagatgtgattccaattaaatctataatgcccaggaatatgcagccgatttcagtggctaaatgaaagaacaatttactcttgaaaattttcagtagtgtgttcagaagtgtgcagtaaactgtcgcaaatgacactgtcagggagatgaaaatcagtaatatattaagtggaaagaacaagaacgcgattgaaacaccggaacttgaggttagtaatgcaattgtgagtgaattagacgcaaattctgtagaccgctcgggttggatttcaagcacgcccgagtaaaccctagcagcaattgctgacattactatgccaaatgttgttattgttcccagtagaaaccatatcgaattagtaaaatgtaaccttctgttactttgtacgatttcaacatcgttagacacaccaccggaatcactcatcaactcaaactgaaataaactaaactttcaaaaatttccaacaatttaataataaaataataattaaactgtatcaaatttaattttttccaattttaacaaactagccaatttttaccatacggtcccttttttaccgtatatacagtcgttttttaatgatttttcaggttattactgtttagtttagatttatctttagtgtaaaaatgatttttataggtaaaattggattattttaatacccaaattaacacatatattaccatataacacgggaaaataaagtatgtaattactatcaagtacatatttacagtgcagcaatagtattatatagttaatgccataggtaagtaaccctggattggattttccaggtcaaacccagccagtagtaatggtaccaagggcatactttagggtccagttactcttcgtacacacttaattacgagttaattataattttctggtcttaatagaggttaaatctgttggtttatgtggaaattttggggttttaaaattttcgaaatttggccattttggcctggacccaaaagtgacatttgggttccgaaaaaatcaaaatttttcgactatttagaaaattaatttaattaattccaaatcgttcctattgatgttttagtcatcaaaatacttaaatttaagaaaaaaagttagttttagctatagaaaatttgggttctttatgaatcctcaggttcacttgagctgttattatacagttttatttatctattagacagaaattttctagttattatcctaaattaacactaattcaactttaaaatagataaattatcctaaattaagttctataaagcagatttctgagctcaaaaatcttagaacctccccgtaaattaacaaaataaatataaaattccttaattatataccttaaatactcttaaaactattatataaatatctacaattcgatatatttactataatttgtacttattgctatggttaagtacccctcagggtattatcctggccctgttaagcacaagtttaagctccatttactcagtgtacacagcgaatttccactttataacaattttccgattcttaacaatgttaattaaagttaataatgtggaaatttgggaaaataaaaatttttaattttggcctaaaatccctggacccaaaagtgacatttcggttccgaaaaaaatttttttccaaaatttttaacgaataaattatttaattccaacacattccaaacatcgttttagacaccaaatcacttaaaattcttcttaaaagttagtttaaactatagaaaattctggttttagtaggcacctggccactgtacaacggtacttttaaccactattacccagctattagactggaaatactcctaaataacccttaactaacactaaataaacttaaatatgctcaaattaccctaaatttagcttaataaaatgtatttttagggtaagagaaatgagaacccctagaactacacatgtatgataatatatactcagtataccataaccatactaagatatctacacatatacccatgaatatacttaatagtactattgttagtaatacttttaggtattctaggacaagtttactccattaactggtctgagagccaaaattctcaattattgttgctaattcttgacgcaaacgtttattcttacgatttccaaatattcctactattactcccaattttactataataattgtggtaattgtagaagtatttaggatatgtatgcaccatacactggaattatccctaattccataccaattaattattttacatttttatacataattttacaatttatatataattttataatttatatttgttattttgtacaatattttaccagtttaatgtagaaattttttacacattttcaatatcttacacattatccaaactttcccaaattttatccataaaatattcttttatcattttttaaataatcttttaaatgggaatttagttttttatcgtaaattttaactttttaaactaattttaacatttcaatttttacacaaaatgatcaaattaatctcaaataatctcaaattaatcttaaaataatcttaaaataatctaaaattaattattaaattgggggaaggttggaaaaatgagactgaagaggatttgtaggaagatttgtttgtttctgattggttttaacttgttaattccggtccattttctcctcagcacaactgactcactggatttaaccccgtttagaagactttgcggtgtgattgtgacggtttctgggatcctcggctcgttttacctcttggtcatttcagccaagtttactctcacacattttaacaaattgttgacaattattattaactccgtaggtctggtgtataatgtcgtgctaactgttacctctcacaaggggaataatatcgcctttttctggctaatcaccatttattctgtcattatcggacttaacgaatgcttcaccattgtcatcgatcccgtcaatattcccttcttcctcatgggaaccacactctccgctcttatctcctctttccacaggttcatccagattaactcggtggacacagtggacacacagggtaacagaaccctgttgatagttgggttggtggtctcagtgatagtggtaatattatgtatatatggttatggagggagtgcgttgtttagtataattgggataacgaggatgactgatttcacgttggataactcggacaacaagttaacccaagaggatgaaaagtatgaaaagtatttaaacgacaggatcgtgcacaggatcaagaatctggaatacgaaatcattctcaaacctaatctaatccacgactacaccatcaagaatattatcaactccaaggttaaaaatgttaaggaaagggaaaacaagagcagttccatagtaagacataacaccaatgcctcaggtaatacatagtagggtaaatgggtggatagggaaattgtatttttagtttaaaatggttaaattagttaaaaatagttaaattagttgaaaatagttaagttagtgggaaattggtgagattggtgggaaattaggaaatccgcaaaatgacacttttataccatatctatactataataatactataatagtgttagatagtgtaataatatggttaaagggttggaaatggaaaaaattgaagaatagttaaaattacataaatcaactttaaaataattaaattaactaaagattatgtaaatttggttaaattatggaaaaattaaaaaatcacattctccatccctaaacacctatttcccaaaattatactcttaaataccccaaaaatagtactaaaatagtactaaaaatagcctctaaatatgccttaaaatactagaataaaaatagcttaaataagccttaaaatactagaataaaaatagcttaaataagccttaaaatactagaataaaaatagcttaaataagccttaaaatactagaataaaaatagcttaaataagccttaaaatactagaataaaaatagcttaaataagctctaaaatagctttaaatagttaaaataacactaaaaacagtactaaaatagtactaaaaatagcttaaaatacctctaaaatagtactaaaataacctctaaatatgactaaaatactactaaatttcccggaaataaccctaaaatatgcttaaaataacactaaaataagggtaaaatacgcttaaaatagcttaataatactgatagaatgtgtagatgacgaggagatggttgagattgaggttttggtgagtgagatccgttatgagaatatgatgacaggtttaacgatacaccgtcacgaggtgggaaaagacgttaaactatcacgaatccatgatgaatacattgacattgacgtcaacctctaccacttcaagtgcgccgacgtgtttaaacttaataacctactcctcatcaacgttgtcaccgtacaattcgatgataaacacacaccgtcctccaccaactccctcaatcacactcttatcatccctggcaattctcattctaacactggtaacactggtaacactggtaacactggtaacacaatgggtacaggtaacacagtggcttctggaagagtgtgtagagaagagatgggagtgtatgagatgaattattatttctttttggtgtataataagatgtatcagtataagccgaacagtgatgagtgggtgcaccccgtggagttactgctgcaactttcacaactacacatacaacccatacacacatatatacacaccacacacagtgacaagggcacatacaccaaatacctcaaatacttaccatttaaactttttaaccgtaaatctcacagtcacactgtggatactggggaaaattccaccaattctgctgctactaacacagttgataataatctcggtatagaagaggtgagagagaagttggtgatattattcttgaataacaagtttaagtatgggttactgggttctttgatggcggttttgatgaatctgacaactgtgtcaactttgtttatcacgtttccaattgttaatttggcgactgagttacagctggagactgctaacaggctccaatttgtgctcagtatcgtcggagtagttccgattttattcctgctgttggcatgttttctggagcattttgagcacatttcacctcaaatgcactttgacaacatttacaagtacatttttatatcttttattttatactttggggttggaattggctcgtttttcctactccggaacgggaataacagggcccagttaacataccacacggcgtatttactgattctactagtgctaatgctgtgcagttatggaatgaacgtgggcatcacgctgatcagtgtgatgtttatcaagtccgcaagagtggacgaactcaccggaagaagactcgaaaataacattaaaactaatatccaagtcatgtcattcatgatgataatgtacaatagtgttagattcacctacatttggatttatcaaacatatgataacagcttctacaacaagttctactggataatctaatacctcaccttttatactatttatcctttagttaaagatattttagagttagttaaagataattaagggttagttagggagttttgagaggagggttgagggttttggaagtgggttttagggttgaaattggacttactaaacccttgattctgctaatttagagataattaagcatatttaagggttaaaacaagtttaaaatatgttatttattgtttattcccttaactatatacttaatatactatactataatatatattatgtatgtgtatagtagtaatagtatacatagtatagtattagtatatattatagaatatatagtacattaatagtatactaatactatctacatgttaatttaaacccttgtacaatagtttaacacactttgtatctatgtgtaagattagaataccccttaaccaaccccttaccaactcaataagatcttaaactatgtgtattgttaagatgtccagaaagtgttccatagaccacaaggtaactatttactgctaactttgtagattacaacacgattaaaactactaaagactatcaaattgatctcactaattacttctagatctacctaatccttaaccacagatctatagtttatagatctaatagacaaaaattgagggttaagattaattagattaatattactgaattggataagataatggcatcggaagttaaaggtgattctgcttgtgtttttccgggaaaacatgcgttgcttaatttaaatatgggtgtaaagcattctggcagtgttgactgctttgaaagatacaaattcatctacgatttctcagatgacagacgcgcagtctcaaaatgcgtcgagtttttcacatttcccgtaaatctatttaaagtgctattaggagatccgtcaattcgggaaccagacgatataaatgagccagatgatataaaggagtctgcagcaaagttcttggcgtacgtaactcctgaggctgagacgtatgtcctggcggtgccaaccaactccaatctgatactattccgcaaacttgaaatctactcatgggaacgtatcaacactcaagtaaacttgtcaaagctggaaatctctaatagatatactcatgactatgaagagtattttgatttcgaattggaagattacagggaacccagccaacttggtttggatttttctaaaccttattactatgatcttgaggagactaattttaaaatcgttttcaacaccttttgccatagtatttcatatgaagagaaggaaatttgggaacgaaccagagataacgctcgccacggctatcccaattccctcaattttgacctgatttcaggtgatgtaaccgtcactttcatcgatggaactactgaacatctttacagtattagacctactgtcaaacggtctagagatgaatcggaaaccatttactcaactaatgtgaaggctgagtcaaatagcgaaaaagttgtgaaggctgagtcaaataatgaaaaagttgtgaaggctgagtcaaatagtgaaaaagttgtgaaatctgagcctctttacagtattagacctagtataaaaagacctaaatctgaagttagttccactaacttagttaacctgaaacttgaaccaaataatgcaaagtctgaaccaagtaatgagaatgtagaggagaaatcagtgttacctaaggttataactctagacattaatacgataatgtcaacaaacgagtataaaacggtttgtggtccaggtttccactatttcaaggctaatgacgggtttgtgtttgggaagatagttgagggccgtagagtgattaaaaagttagataatcccataaaccgctatgaagtctacgaaggctatcccgcgtattatgaccactttgtaaatacagaacgatttcagtttctcaggcctaacaaagataatttaaaattctataccaataataaattacttacgcctgaggattacaaggttaaatctaccaagtatctttatagaattgactttcacaagcctttatacaggataacatatggtgacaaggtagtctgggagtttgactattatgaacacgagtttctccctaccagtctttacttcacacacatgaataacatgattctattgtttcccaacggagttcatagagatgtgaaaattagtgttaacttgttaaaattttataaacaggatgaatttggtaataaaatacaactggaagaattagactacgagattatgaaacctggagataacaaaagattttacacactaagagaaaatattaaatgtgttgaggtttggtatgatggatacatggtctggcaatatgataaagagtatcctatatcaatttgctgcgactacacattggacagagtagacattagattcagttcctatgtaggctcatttgtcagatttgaaggctccagttcgtttacgcaagttcattacttccctaaccacttaaaactctatgcacaggatgataaaattgtagaattgagccaggataattacagaattgaagttgttaattctacaactgtaaagtatgtaattaagcctgtgaaatatgaccggatgatatttgagaaatcacttttatggaaacagagaaatggagcaccaattcccaggaaaataatccacaaacttgtaaatcccaccattctcctgcatcacgatacttcacaaaatcagacaaagataagaaaatttaacagatacaacggaacctgggatcttaacatttttaatccaatctctcattcttacacattaatcacatagttacacattttacacattcttacacactaatagtattttacacattaccgtgtcttatttacacactaacgtgtcttttcttacacatttacacacacttacacactttacacatttacacatttttatactagagtaattgaatattactgtgttaaatagaattatactgtgtaaataagtaaatatagtgtgaaaagtaggaaaattattgaatttggtagagtgagtgttcttgtttgacgagttgaatttcatggtcaaggaggtgaaacctcacgactttcccgtccttgaggaacaagttaaccttattctccagtatcttgacaattagaatcttcaattctgggcctgttctggtccaaaattgcttattgttgtatgacacggcgtcacaggacccgagagtaaaaatctcaaaggtaaactccttcaaatattccgtcgtgtcatctgcggcaattggtttcccattactatagaacattagtttgcccggatccacccgagtttccgtataattaatccacaaatcggccctctgttcccacttgtacaggacaaaattaaactttttcacgtatagcaggaggtatttagtgacattatcgtcaaaaaggtgcacacgggtcaggtaatttgttggtataaaagataaccaaattactctacctggtctctttaatttgctgctcagtttagctgctatttggctagtgctggtactcttgatattggactggataactttattaaaggcatagcccttgtaggggaaaaactgcgtgaaattgccgtttctgacactgtagtagtgcgtggcgtccgggacagtaatgtccaggtccacacccacactaatctcactacccctactgtaacccacagcgccgtcaccaaatatacgcacaaactccttttccacacgcttcacctctgtacaattattaatatacttaattagggagggagagggaggtgagtcactattataactattgaatgtgtaaaaaagacacgtaaatgtgtaaaaaagacacgtaaatgtgtaaaaaagacacgttagtgtgtaagaatgtgtaaaatgtgtaagaatgtgtaaaaggtaaaaaatagtgtaaaaatgtaccgtttggtgtgtgtttgtaatttttggatgagaggttgacggagttgttgacgaagttgtatgagaatgagtttgcgagtttggggaagtatctgcgtaggagttggggtgggtagacaaatttaacgcagtagcttagttcctggaggtagacttcgtagtggtcaaagagatgtgccaggggtttagaatcctcctggttgttaatgtggaacttgagcctgcccaagtcacggctgttgacagtgaagtcaatccacaaatttaacctcgggtcccacttgaaaaggcaataattattatccacttggagtattaaaagatatttctggtatcccatgcaggcgaaggacacttccttcgcctgctcaaaccagtttttagcctgccaaactaccaacaccaagtccttcaaattacttctatacacaatcttacttataaaattgtactccttcgcccggaaatccgtgaaattcctccggttcaccgatacattctcaccgaaatccgtcatgtaactcaaactcacactaaagttctcctctatccccgcgttcacaccaacacctccaacacttacaatattgctgctgggagtatcagtggtagtaaaattggttccgtgttcgccgttgatgactgtggtaatgtcgagggtgagtttgttggtgacagtccagacgctgttgacgagagttagctccttaacatccccgttaaagaggaataaaaccaactttataacctttgacagcattctgttgcaaatgacttttttaagatattccgctggattgttacccttgtaaatcagttccagggcggtaaaggggcccgcagtgggaggtttcttctcaatttcctgaataaccttgtcaaacccaaagccctcagtgggtgtgtaaatcccaccttttgattgttccaagtaataagtgttttcagtcgcgctttcaatgtttatgtccagtgtcaaaggctccagaggcggcaaaggtttccctaactcagggttaggaaatccattattcacaccaatcaccaacttaacactctaattaattagttaattaggttatcaacttacacataggattagtagttgcagtaactccatcgtacgctgagtgaactattgtattacgaattctctaagtgttaaatggttgatattgtcagaaaagttgtagaaagagagaaattaatgttaaataataagttaattgatgtttgaggagttgaattaaaaagtcaaatttggggtcaacggccgtaaaataaatttttaccttattttacaactatttacaattgcatttattccatcaatttcagctaataatttctattaattagcgtttatttggttaataaagggttaattaggggttagagttaactatcactgcattagctcataccagtgtgcattatcacagtattactatagtatatatactatagtatattatatattatatataccttagtatattatgtatagtatagtattatatgtgtctgggtttacggctagtaaattaggtgcatgttacacagcgtataacaactctattacacatatctaagcttattacaacagtattaaagagtattaagtgttaaatagtattggagttagtgttatctcaatgtatagtaaagtatataatatactctagtatactcttaatactatacacatacatatatacatactatatatatattatattatatagtatataatatatagtataatatatatagttagtatagttaaagtattataggtatagttaaattagctccctctcggggtacataatatatagtatactgtagtatataatatatagtatataatatagtattagtgtatgtggtacaagtagtacagtgctccagttcctaggcatagacacagtactaattatacaattcagtgcatactaatagtatagaattcagtgtatagtaatagtatataattaagtgtatagtaatagtatagaattgagggtatagtgctatgctgtgtataaagttagtatattagaattagaatctccaccgatttttacagtttaggcacgtaacaaatgtggtcatgggttcatctgacgaccttgtctgtagctgataataagttgtaactttggagttacacttgttacacttgaattgtcctgctgatttcttggctaggaatatatttttgatggcccagtcagactgacacgcctctagagactgttctaaaatctcattccgctgtaactttttctcatccgaggccatttgcaacgaggtcatcctggtcaactcatcaactgtaatcattttattatacagtttatagtttaaaattgtgtttttcacgtcttttaggttaaatgctatgcattttagctgttgattgtacgctttgcggttatcattttccaccacgtagtggtcgtacaatgataattccatagagtttatcaactccgataaacgcgttaactctggaccaaagtcctgacccaacaggaaacacctgaacaaatatctcaacgccttgtcacggtgtaaatcattacgcaacggacccgcgtactcaggcactaattcatcaccgtccacattttccacattgttcacactgtctacagtgttggtagtgttagtattagtttcctgagtagtaactgtgtccccaggatcaacattgttaacagaatctgtagagttgttggagttgttgaagttggagtgtgaattgtgtttgattcgtttgggtgatctgagttgatttttccagttattgatgagtgtgattagtcgttgtgagtgttcttttgagtgaggtgcgagtagtttagaaagtttagttaatgaagaaccgatccgtgtcgactgcagcacatcacgatcaatactcaacgactccaattcacacaatatcccctcctacaacagaattaacaacatttatcataatttacacaattttaattgttaaaaatgggattttaaaaataaatgccaaagttgatcgggttacgaaaataaattttctcacccggtcaatcttgctgcttcaacaacacatttggtaaaaaataattgtaaaaagtaaaataattgtaaagaggttgtaaaaagataaataatggggatgggtaactgtgtagaaggtactgtggcttggttgtatgatccgttactgagtgaattgataatctggtcaattctccgttttagttccaaaatattattcatcaaattgttcaattttgtacatgttcacataaattaactttttttcactaattttcactaatttacatattccaaaattatcaatatctaaaatatatttaaaaataaataaattaaataaataaaattaaataaaaataattaaataaaaattaaataaaataggattgagaaattgatgtgttgtattatggtgtgggatagtggattagtaagagaaatttgatggaagtattgagtgttgatttgggtttggagttgttgtcgatttttggtcttttgggttctgcgtgggtgatttcaagtacgttaggtcggagtagaagtccgtttgaccgcgaccggaacttccttcaaagaatttttaagcccagaaataaaatcaaaaacatctaccaactcataccaatcctacaaaaaaataccaaaaaactcttcctattcttctccgatctcgccacgtaattcttttatatacttaattatgtcatttatatagttaattatatacctaattatgctaattatatagttaattatatacgtaattatgctatttatatagttaattatatacgtaattatgctaattatatacgtaattatgctaattatatacgtaattatgttaattatatggttaagatgtatgaaaattgtgtagttcgttgaggagtgtgactgagatgagtggttcggtgatgagtagggagttgttggagggtatattatcgcaggagtactacgagcaaagggtcacagacctacaaaacgaagttttcaacgaattcaacgtcgatccccacgacgttctcaacgccatcaaacactttcaaaatgtatttcaccatatctttaggggattattttactcagtttctctagttatttactcccactaactcagtcatctagttatatatccccattatttactaatttgcaacctttttgatattttattttacatttgttaattattttttcctaaataagtagttactgcagcaatattggaggaaattttcctctccatttgctaacccgatcaactttcgtatttatttttttaaaccccaatttattaattaaattttgtaaaattggataaatagtgtaataatgtgtaggacgaccaggtggagttgtatgtgggaggtgtgaatcgtatgtatgaatctttgttaaatagcgactgcgtcatttgtcccgggttcgaacccaacccactcatcacacaagacaaattcctcacaatactcgaaaaaatctccaacttcctctttacccatactaaccacactttcaacactatccacacttctaacactatgaatactattaatactattaacactatgaatactattaatctgaacactatgtacaagaatagaggggaaatggaggagatgatgttgagtgagctgttggtgtatggatatgaggagtatttggactgtatggtatgtttaaagagtgtggagaatcaactcctatacgacccggactataaagtaaaaaagttaaaaatattaaataaaataaaaaaatgctttcaatcgacaattatacaaaaggtcacaaacaaacaacttcacacattgtgtacaggggacactaattccacagtgttgatattattgtttgatgaattaatagttgaggaatcgtttgataaagttttacgcctgtcaaagcttttacacaaagttaatcagccaaacttcaatctagtcaatctcattaatcagttggatcaacagttggatgtgaataaattggatgtaaaattggaaaatgatgaaaataatgaaaatgatgaaaaattaggagaaattgatgaaaaattgggggtaaaaaaaataaatgtcaaagttgatcgggttacggaaaataaaatttcctcgcctagcatttctgctgctactaccatagacaccttcatcaacatcaatactaatactaataatagtgttaacactgataatagtgtaaatagtgttaataataccaataatactaataatacaattaatagtgttaataatacagtggatagtgtgaatagtgtggatagtgtgaatagtgtggatagtgtggatagtgtggagaataatgtaatattgttatggatgtttaagagagagtttgagtgtgtggagctggtgaaggaatatccttcgttggtaatttacaaggataaccaaatcactaatgtcataccaatctatcactacacattaccacacatattcatttatcataattatgttaattaggtattctggaaataaatgtcaaagttgatcgggttacgataaataaattttctcacccagtcatttttgctgcttcaataacacatttggtaaaaaataattaacaaatgtaaaataaataccaaaagggttgcaaaaagataaataatggggatgcgtaaataattagagtatgagggagctgagtaataaagtaacccggacatgtagtaaattccaaaattcctaaaatccccaaatccaaaaatattaaaaataatattgaaaaattaaaaaatatgaatgtgttgtgagattgtgaaatttggtgtagatgtgttggaatgatggaatttggtgttggtaccacacaggcatagtagtgctaaaggattagttttagaaattcaagttgtaccagggtccgaaacttcaattaatattttcaggcaaatgtgcgcttcagtcaacagaaataaacccgtaagtcacaccacaacctatcctatcccttacacatttttactttcctcttttctaacaagagcgccagttatctaatcaccaaatgcatgtgtaattattaactaattctaaccaaattccccaatatatacacaaattcttacatttatttattaattcaatttattatattatatattatattatattaattatattatattatatattatattatatattatattatatattatattaactatgttatattattgattgtggatgaaaatgtgtagagggtgggatcgaggaattcgtcgaggaggtcgagtatttcgagtactcgttcggtgagatcgactcgtggtgaggagttggggaaattactaaacgaacgtacgagacactcccaaatcgcagccttcaataaagataatccacccaaacacatgaatctacgggagaatatgaaccttcaaatgaatctacccaaggaaattaatgtacccaaacaaatgaatctacccaaagaattgaatgtacgagaaaatgtacgtgagaatgtgcagagaacgccgaggggattgaaggagcctatgaggaaacctgttgacaagcctcttggcgcacaaaaaaccgttaagaaactaaagaaaccgtcactattctcgagattactcaacaaggtcaaatcactcatccactaaccacccaataatcttatctttttgcaacctattgtcatttattttacaatttgttaattattttttggtaaatgtgtagttactgcagcagaattggagattattttcctcggtaaatcgtagcccgatcaactttggcatttatttttttaaaccaattttttacaattaaattttgtaaaattgttgataaaattgttgataaaatagtgttgaatagttatatgagagtgagttctgtgagaagtttggagatgcagtgagcggcggtgagtgagtgtggtgagattttaataacgtcgtcgacgttttcggtggtacctttggagtgcttatgggaagtagttccgatatgcacaatcagtggccgtttaaagtcaaacttggatataaaacactttaaactctcgtaacgtcccagcgtagataaaccaacactataaccatccacaggcttcacactatcccaatcattcttcaacatctacatttatcataattgtgaaaaataattagaaatttagtgattttaaaaataaagttaaaagttgatcgggttagcgaaaataaattttccactcccgcaatttctgctgctgtaactacacatttaccaaaaaataattaacaaatgtaaaataaatgacaaaaaggttgcaaaatgataaataatggggatgcgtaagtagataactaagttagtgggagtaaactgggactaaactgtgtgagcggtagcaagccccgtaaagtacctgtagtagtatgttattattagtggatttgactttgcgattagtgacgagagattgaatgagaacctcaaataactcaagagtcctcggaaccgaaaacgcaggattcacatctatcaactcattatccaccgttcttatatacaccttcaaacacaactcctaacaatattctccttatatacttataccatactgttacttatattatactgttaactacataaatagtgtgagtatttgatagcagcaagaatgggagaaaattttcctctctaattcgtaacccgatcaattttggcaattatttccaaaatcacgttttttacaataattttttgataaaattgaataaatagtaaaaaaggggtagaatgtgtgattggggattaccttgttgagaatggaatcttggagtattagcagggactgatgtaaaatgtctagtctggactcctaaaataataatttatacataaaaattaccctcgtattacgtaaatcactatcctccaataccacgtatatcctcataatttcatctacattacaaatattctattaatttaatttaattctattaatttaataatttattgatttgagaattttaatattttaaatttataattttaatttggtaattttaagtttgagaaatttggggagatgagtaatgtagtggagttgctggtggtattattggacgagataagaccagtgaaaacagtgccaactgaggactggaagagaataattaacaacgtcaaatctgaccttaaaaacacgaaaaacttcatctacgcctcacccgatccactcctcgaagctttttcaacctttctcaactcctatctctccaacagtattttacccctcattcctactcagttttagttctcactactcagatttacttcttattctcagattacacagttaatatataatagataaatactatggaatatttggatagaatgtgatagctactgattttggggagtcggggtattttctaaccggctatatattaatatattattaactgggttgcatattgattttagagtatggattaccagggtcaaatctctacaacgctctcacacgtattatcccatacttttacacataattatgtagttaattattatttgatcaaaattattgaaaaataattgtaaaaatcctattttaaaaataatgtcgaaaattgatcgggttagcaattggagaggaaattttcctccaattctgctgctcccaaatgtttatactatttacataatgaactttagttggaagagtcgtcaaggagaatggatacttcaatcaaaactctgaaacacattcctcactcgataacactgtaacaaccgataacactgtaacaactgataacactgtaacaactgaaaatacggtaaataccgagaatacggtaaataccgtaaatacggtaaataaggaaaatagtgtaacggtggtaaatgttgtaaataaggagaacggtgtaaaaaatgtggatttggatggagggaggaaaaatacgtttgtgaataccattaaaagactattcaataaacaaggtaattatactactttgctgcttatctgctgcttactaattaaataactaactgaataataattagaagtggatgagagaaggtattatagagatccttacaagctgaggtctggctcttccaaaggtggatcacaactcatccccaccacaagtggggataatcacacagaacaaactgacatcgtcaacactattgatggagttggtgtggatgtgattactccgtcacggcaggtgattcctgctaataccactattgctcctaatactactattgctgctgatactactattgctgctagtactatagatatcgaggaaaatattacccattctgctgcttccattactaacactaatactatagtaaatactgaggatagtacggaaattgctgctccagtagagactactacacctattgctactgctaatactgtagaaattgctgctacaactgctgctcctacaactactacagctacaactacaactacagcaatgacacctaacaccgtaacgcaaaacatatacatcccgttgaataacataatattggagatgaggaatataaatttgtatgtggtggcgttggagatgatccgtgcgagtgtgcggaatgtgaattcgcagcgtgacgtgtataactacagggctgtggaccccagtgtctttggcactacgagtggcattgactactcaatccaagtcatcacgtccaacgtcaagcagcaacaccatatcaacttcggcgacgtactgagactaaagagagtcgacgcctttgtagtcatggataaactcggcaagaaacatgtcaacatcatcatgtcactcaaaaacttccccaccatgagactatggcacgcgggtttttacgaaacggtgcttggtcacacggcacataacaattctaatactaccactactaccaatggagtgaatggagtgagtgaggaaaatactaccgattctgctgcagtaaatactgtggatactgtagaagatgtgatgggtaccgctggtacaagcaccgtaacggaggtaataaacgtctatggtgggataaaagtgaacataacaaacgaggacgtgaggataatagaatttctaaagagttggtcaagtaaattgaacccgtgccagctcctgagttcggagtacttaagaaagttaaccgatgcctcggaaaacccgtacgattttatagttaaagttttaagagtttggaccgcagaatttacgctactggtgagtgacagcagcagcaaggcaattgtgagtaatttcgacccgatcctagtgtctaacctgttcaacagcagtaaccccttacaacgaggcgactgggtcaaactcagatcattcgtcagagtcttcaatgataataacagaatgatcacacttagcaccaccaaatactcttgcgtcacaagaatacccaaccaacacaccaacgtcatcggagacgatgataagtatcttattcagttattttaacagttgtatatccccactatttatcatttgcaacctatttggtaattatttaattttgttaattattttttggtaaataagtggttgaagcagcagattagatagttattttcctctccatttgctaacccgatcaacttttgcaattatttccaaaattattaaatttctaattattttaataaattagatttctatatttaaaagtttaatgataattttctatagttatttaaaagttaaatgataatgttcagtatgttggtgcgtgagcgtcgtgtgaatttggatgtgtggagtaggacgtcgtgtttgaataatagttttccgaagcgatttaagcgttcgccgacgtttatacaaaagttgctaagcactcagccgacagtctcatttcaaaaagcctcaccaaacagaatcgtaccagaacgcgaagaaggagaaatctcacaataacacacaatatcactaactttaccactaactattagtaattatcaattttattagttttactttgtagtaaagagaattttagcccatttggtaaagcattgagtaaagtattgagtaaacaattgagtaaagaatttaatgagaattggtatggaaatgtataatttaagggattggttgagatttaaaagaatttaaatgttaaacattttaatatgtaatcataccaatacatatttacatagtattaccacagtattagcatgttaggtgtctgggtttagggttttaggtcttgttattcttaagtatattctaggtattaggtatagtactgtagatatattatatatacatatgtatatacatagtatataatatatactgttgtatagttattgggtgtctgggtttagggtcttaggtctgggtattctcaggtataatactatactattaactatactatagtattactatagtattcttaggtatataatgttataggcatagttagtagctgtaggatattactgtagtagcatgggtattgggtgtctgggtttaaggtcttaggtctgggtatgtgtatataattaaggtgtagcaagtagtataactagcatattatagtagtaaagagagtattcttgggtattatgtatatattactggtattatatagttgagagtatagtattaggtataaagtgtatatacgtataatatatatagtatataatatacagtatagtattataggtatatagtattcttagctatatagttaagtagctccctctaggggtatatagttaatttagctccctctaggggtattatagttaaggtatatagtattcttaggtatatactgtagtatattatgtagtattagggcttaggtctgggtattctgggtatagacccaggtatcttaagcacatatttaaggtactatttacttcttaatactattttatactgttataaaacactgtaaatagtgttagaccatattctatatacagtgctttagctagttaagataccaaaaccccgatctctcgaacctttaaacacacttttaaacactttaaataactctaaaacacccttaaaatgctttaaatcacccttaaacactcttaaaatagcttaaaacagtttaaaacacccttaaacactcttaaaacacattaaaagtgtttaaaatacgcttaaaacagttaattcagcggtactatacctagtaaatatagtgtataatatatagtttagtacattaagttaatgattaaatggattatgaccatatctccttccttctcctccatatcccccgtatcctcctccatatcccccgtatcctctgtcaactctgtaatctctgtcaacaggtctataccctctatcataccccctatcaactctgtaatctctattgtaatctctgtaatctctatcataatctctgtaacctctatcatatgttctatcaactctgtaacttctgtcaacagttctataatgtttggaggatgaactgctgctactgctgctgctataactactctcactactactgctcgtactactcttactgctataactactcgtactataactactgtcagaatcgctataggaactttctgtggtggagtagcgtttgaaggtggaatcagacttagtctcaagcttgttaaagttctcgtctgtctttcgattattgtggaagctgtgggtgtagtaatcatttcccacactcacctccggaaacgcattaaatccatccatgccaccgtaacccccgtatccaccatatcctccataggaattaccgtaaccaccatatgaagtgtgatgggacggaaaagattgattttgagagtgtagagaattaccgtagagtccgatattgggctttgtgacctttaacttgttactaaataacctactcaatatccccttaccgcccgtagtcccaaccgtatacgcactacttattccaatatttccacttcctataccatttcctatactatttcctatactatttcctatagtacggacatttccaatacttggtacactatgtggattgggtaaactatgtggattgggtaccccggataaagcgggtacggggggaacggaatgatttttatcgagaacgaaaacgggtttgtgtagtacattagtttcaacgattccgttggttgaggagagtgagatgaacctgtccctgatggatgcggagtacctgcgtttgtcctggagtgttctgttatccagaactaaagcagcaatttgtgcagctttatcggagactaagtgtcccaatgctctattggcggggctaaactttaacttcccaacagaggacagaatgtgtaaattattcattacgtcgtagatgcaccggtctgacccgttgattatcagataattcaacaggtttaacgccttttgaatgcgtttaacgcgacggggagaggacgagatgcatttccaagtgcttttcatgattttctggaagaaaacctcgtggtaagtggcctgagaaatgtcatacaaaatcgaatcggaacacccaacagagtcactaaacaacgcctccctcaaacacttgtccaactcacccgatgtcatcaaacgcacctgctggttactcgaaccaaacgcctccaacttattacgaatcatcacagcacaaagtttaccaaattcacaatccaagttttttcaaagtgttttcgaggtattttcaaggtaatttcaaggtattttcaaggtattttaaaggatttttaaggtattttcaaggtatttcaaggtattttcaaggtattttcaagatatttttaaggtattttaaaggtattttaaagggtaatttggtgactaactcagggcaaaaatctgaaaattctgcaaaattttgaaaaattgtaaaaattctgaaaattgtaaaaatttgaaaaattaatagattccgtaaaaaattgtaaaaaatggtaaaattctgaaaattcggtaaattcagtgaattattggataaaacaggtaaaacaagttgaatatttgtggagagttgagtaggttggtttgagcgtgtatagataagtgcgatggagagagaagctgtgattgtgggtgaatgcaaattttaaagtatggaatgtaaattgaacagtaaagtactaagatcctaaaaggagacccacaaaaatactaaaaacaaattaataaataaaaaaatataaattaaattttaattcaaatttaattttctcacgttaaattaaccaaactcttctggggaaacatcaaaccaattctcaaattatcaaactaattctcaaattaataaactaattctcaaattaataaaaataataaaataaaaattatatataaaaataaaataataaaaattaatattagtgtggattagtcgagagtgtaggacggatcgggccgttcgtgtgttttatgtgagtttggtatgtaatcagtgtacaaatcagactcagactcagattccggcggtatatacacgccaccagctctcgatcgccatcccctccttctcattctattcttatcctcatttacattactgtttacattactatttacattattactactgttattgttagagagtttggactttttgtatttgtgttcgtgggttattcgctcactgtcactttcgtacaagtcatgcttccatctttcaacacttctactacttctactactattactattactactattatccctatgtttagtatctctatgtttagtattactcctgtatttagtatccctatgtttactactacttctactactattattatccctatttctactactcttatatttactattatccctatgtttatgtttactactcctatagttattattcctatagttattactcctatggttactattcctgtagttagtactgtatttatgataggctagattgagaggattgaagggttctctgggtaagcttccgtcgctactgtcactactgtgcctaaattatattatcacaacgtatagcgcttggttaagaaatttctacagagttagctactagtttggcaagaggtttcgaacctaccacccctggctattactatagctatactacactgtaccattagagctatgataactgtggtaattatttgttcatctaagttagaatttagtaagaatttagcaagtatttagtaagattatatgaaggggtctcgatcctggtacccataggtccataactatacaagtagtcaactgtactattacaataatatttaaagtggtaactgaggtttgattacctatcccttatatttctacgattgtggtgtgtatgtttattctttctagaccactcgtacgcctcctgtacattcatatcactattactatattattatagtattactatagtattagtattatagtattaataattgtgtagtggagagtaattagagtggttacaagttctgacactgtaaaatcatcatttaccataacaaattattatccctattatttatcttatttttagtattctattatattattattattaatattgttaatattattatttaattattttgtttccccgactttatttttactccaaaataacatcagattccccaccacaattccaataaactaatttattttattatttttattaaataattatttttattaaattattttatttgataattaattggaaaattggaaaataaaataattaatttgaatagtgaaaaatgtcccatcgtaagtttgagaggccgagatctggttctttgggattcctgcctaaaaagcgttctaggactcacagggctaagatccgttcattccccagtgatgaccccgctaagccaccgcacctgacagcttttgtcggatacaaggctggtatgacacatgtggtcactgaggtggacaggcccggctcgaaactgcacaagaaagaagttgtggaggcggttaccgttgtggaaacgccgccaatggtatgcgtaggactggtgggatacgtagagacgcccaggggactgaaggtcctgggaacagtttgggctggacatttgtcagacgaattaaggcgcaggttttataaaaattggtacaaaagtaagaaaaaagcatttacaaagtacgcaaagaaatttgcagaaacgggaatggaacaggagctgaaaaggataagaaattatgccaccgtcgtcagagcactaatgcatacacaaccttccaagacttctctttcactgaggaaagcacatttacttgaagttcaagttaacggagggaccacagatgagaaagtacgttacggtgcttgtactcacagagtttagttattcttcacttagttattttccacagagttagccaccccgatgggactctctttctcactcggaactcttagttatctccttagttataccctttatttacctatccccatttattactaatttgcaacctttttggtatttattttacaatttacaattaaaatttggtaaataagtggttactgcagcaataatgtaattattttcctcagtaactactatcaactaccaattatgttagttagataattattggggtaaaatggacaggggtaagatcaagcaccataagtgtagatttgattacttgtgtccgataataaggctgagctcgctcccgctttcatattcctagtctttcctattctcatactgagacaaaccatgaaagatacaatccaccccatttatttactaatttgcaacctctctacaattatttacaatttacaattattttttactcaaaagtggttactgcagcaaaatggagattattttctccgcatcactcataccattaccaataccattactcgttactattactcatattactaactaattacgataaaatgtgtaggtaagttatgtggtgggtttgtttgagaagagtgtgccggtatcgacggtgtttggtgagaatgagatgttggacgtgttgggtgttactaagggtcacggcgtcaagggtgtggtttctcgttacggagtgacaagactaccccgtaagactcacaggggtttaagaaaagtcgcgtgtatcggctcatggcatccggcacgggtacaattccaagtacccagacatggtcaaaaaggctaccacaagcgtacggaacggaataagaagatttatcgactgggactgggcagttcagcgaggaacggttctacagactcagatttgactgagaagacaattacgccaatgggcggtttcccacactacggcgtggtcagggaagacttcctcatgctcaagggatgcattccggggactagaaaacgagtcataacgttgaggaaaacgttggtgccacagacctcaagacatgcactggcagaagttaacctcaagtttatcgacacttcctccaaatggggacacggacgcttccaaacatccgaagaaaagaaatcattctacggaccactcaaaagtaattaatccattaatattataaccccacttatttagtatttgcaacctaatggtatttatttacaatttggaattaaaatttggtaaatgagtggttacagcagcaatgtggaggagattttcctctagatcttgttttaagatttttcaatttaaaattttagttaattatataaatgtgttttaagttaattctataaatgtgtttgttaatttgataaaaaatgttttaagttaatttgattaaaatgtgataaaaaatgttttaagttaatttgattaaaatgtgataaaaaatgtgtttgattggatatttgataaaaaaagtgacgaaagcatatgcaacaaattctctaaaacaatctcttaacatacattacacattattcatcatctttacacattcttacacacttttacacatttacacactaccgtgtcttatttacacacgtgtcttttttactcttacacactaatttacacatctacacatttttacagattgtattacacactaattaccctttaaaagggtttaaacgttatatttggtgtaatactggttgtttggggtataaaaagatttggcgcgtgggtgtgcttgaggttgaaattttccgggaaaaacgaaaattttaaatttccagatctagccacaaattactcaaacaatttaatatctaacatttattgatttaatatttaacatttataaataagttatagaataattagagtaggggaaagatgaggttgatagtactgtgtatgttaccgttggtgttgtgtgatagttctgaggaactgtctggtctggtgacagttgtaaaatcctcgttacaggagcaaacggataaagtaaaatcaatcactgaacgttcagacgacatgatcactgacggaactaaatacttaaaggactttggcaataatttaaagagtttgtatccatttctgagacacgagtctacagtgccgtttttacgcataattcaggagtttatcgatactaagactggattaaggcgtgaaatctcaaacgcaattgacactacaaagctcgagttaaaacgcgctaaaaaggagttttcaagctccgacaagctgtttaaacggatcatggccacggtaaacttgggaaataagccagacaccggccgagcagcaggaaccacgtacatgcccaaggatagaattgtagagctaattaaaccacacgtcaaatccatcacaatggcgtcgggaaggattaacgaaatcgatgacaagttaataacattgcaaaaggaaatgaagtcaaaaaatctcagactggatgcgagtagtaaattactattgaattacagattcttgctcgagttggtgattaaatcccgtgagcaaactgtaaatagtaaaaacacactcatgagcagcataaatatgaaggataaagttacatacaacttcaatagacttaagtcactactagaaaagggtaaagtcctaatcgaggaaagtaataaaaaagagctttacaccatagaaaaacaaaaactaacacaactccaaacgaaaataaatatcgataaaagggaattgtgtaagatgaataacaaggtgatgaaggaaattgagtatatgaagtcgttgctgctcaagtcagaggagtatgaaaagataatcaagcaggtgggagaaaagaacataaaatcgccagattccgcctataaaaagtcacagcattactaccagctgattgtgatcctcgggaacaaaatccaggaaatgggaaacaaaatcaaacttctcaagctcaaatcgacggaaatgctacaaaacagctcaacaatgtttggtgaaatggaaaatgtcatgaaaaggaaaaacacactaggcgccaggaaaccgaaaatcaacgaaattagaatcaaaaaaagaagcacaaaagggaaagatctagacaacgtcggcatcgcaagcgatacagacgaacaatccgacacagaaagtgattcagaaagtgatcaaattagcactgagagcagcagttccagtagtaattcagttggtaaagtaagaaataagaaaagaagaacgagacaatcattggataattccaggggttcaagtagttccagtggtacggaaagctcagctccacccgtaagaccattacgcagaagaaaagctaatactccatctggcagtggatcttctagtgcatctgctagtggatcggctggtgaatctgttagtggatctgttagtggatctgttggtgaatcggctggtggatctgttgcacaatcgacaaatccatttgcagtttcgtttaatccaaataatcccttcaacactggtgaaattagctctgaaagcagtaatagtagtgagagcagcagtgagagcagcagtagtgagagtgagagtgagagtgatggatatgacacggctgatagtgaagatgaaagtacgccaattttacccttgagaagacgccgtacaagatcccgtgacacagccagtgctagcagtcaccccgccacgaaagttgaaagccccgaatcttcaaatacacaaagtgaacaaagtgtacaaagtgtacagagtgaaagggtaaaaagtgaacagagtgaaaaggtgaagagaggaataaagtcaaaaataggaaaggcgttgggatttataagggatgtcattacaactccaattaatccaaggagagatcaaacaagctgggaatccgcgggaactgagtccaccagggctgagtcaactggatctgattcagaagaatcagacgacgacgaagatgaaattgtcaccaggagatcaccgattcctggtaatcacagtagttccaatagttttgcgggaccgtatccgaggtttaatccatcaacaagtggaactagtggatcagcttcaagaagtgcaacaattggaatgataagaggaacattgggagaagtggagagtgagttgaatagtcgatttataggattaagattagacggaagtagacgttctgaggcgataaaattagtaggattggcatatgagttaaaaaaccaattcgaaatagtaactaaaaatctggacaaatccgtagcagaaagcgcagtcagaattattaaaacagttttaatggacgtactacacacatacctcacaggagtctgcgccaaagtactgaatatcacagacctaagattatacaactaatctactattacatattatatagtatagtataaagtaagatagcaattattccagtgtaaatactgtttgatagtgttataaaacactgtaaatggtattataaactgtgtaatatacacttgatttactagccgtaaacccagacacgtaattactaaaccctaatgctatactatatacccctagagggagctattttactatataccccaagagggagctatcttactataccccaagagggagctacttaactatataactatactgtataatcttggatatataccccaagaggaagctacttagatatatatgggagagggagctaatttaactatataagggagagggagctacctaactatatacacctagagggagataccctagagggagctaatataagggtaccccaagagggagctacttaagtatataattagaatactatactatatactatacttaataatatgtactactatagtactaatatactatgtatataatactatgtataagtatagtattaggagtataataggagtatattatacactttagtatacggtaatataacacttttttcagcattatatacctcttaatatagttattaaacactttaaatagtatattagaacagtgtaaacagtattataccatgttatatacacttgatttactacccttaaacccagacacaatactatactcctactaatatatatatatataatatactaaagtgtataagtatatgtatgtatttagtatagaatatatcaatggtataataagcatttgttaggtgtttttatactcttttaataattaagcataattatgtgtataataatgttagtaaatgagtggtaatttgagtactgagacctctcaagacacaaaatttcccctcaatataacataaccaaacccataattaacacgaataatgtgtaaaataatgttaataatgtgtaaaatgtgtgaataatgtgtgaataatccatttaaagtgataattaacataaattattcatgaatggtaaaaaatgaaaaattttctaaaatcgctccaatcccttaaattaacccaaattaaccctcaatcactgttaaacactgttaaacattgttaaataatgttgagtattaaatttgagtgtggttgtatctatgagcagctagcagtgaaatatttatgctgcgtttaaaagattaagaacaatttattaaatattttctttaaaagttgtaacttaaaattaaataatttgtcaggaataggaattggataataattgtcaggaaataggaattagttaattattgacaggaaataggaattagttaataattgacaggtaaaatgacgtttacgggtgatagagttggggaagagcctggctcaaaattagacacgaataacttaatttggtgtttaatgggcattttggtcagtttttcatttttaatactgataaactcgtcaaaggcgatggcgttgttactggagttaaaagtccgggaaacagtgtcgctaatggccaaatttaagataatttcagttttttcgcttttggcgggatgtgtgattgcgtttttactctttccggcaaatctctcagtgctgcagtttactttattcttatcgtttgcgctcatgtttttcaccggagtaccgctgattgtggttctcacagacagcgtaagctctaaaataagcttgaggatattttatctgttggtaatgtcaggcacctgtctgaccattggattcattaaaatgatcacaattgcctccgttaacgacttgttcgtctcggggaacgccgtgaacaaagtgctgtttctcctggtcgggaacagccttggcgcttttttagtgcactgcatcacgccgtttttagatttctcaaacaaaccactgtttatggatacatgtgggaatggcactcacagtcttagccccgggaagatcaacgcagtcagatcacaggcaattgcaatactttgctacaagttaattattgtgctgattctaacactgctggtcagctgggcagtgctttgctacactaatttacacaaggaacatagaaagtggatgaaattcaatgtaacacaagcaaacttcgtcgtcaaagcgttgaatatactgttggaacagtatccctacgttattctattagtgctagtcgaactactgcatacaatcttcaagtttttagcaggtgcgttacggagcttgtactcacagagtttagttattcttcacttagttatatctacagatagccaccccgatgggactcttttccctacggggtcctactaactcatatctatactagttacctatttacccatccccactaattactaatttgcagcctttttgtattttatttattatttacaattattttttcccaaataagtggttgaagcagcagaaatgactgggtgagaaaatttatttctcgtaacccgatcaactttcgtatttatttccaaaatcatgaaatttattaatatttttgtgtaaaattggataaacagtttaacaatggtttagtgtcgtatgtgatggacggtgagccgtttaacccgatttggctgtcactgttactcctgatgattagtgattttttcgaagttttcggcaagttcatcccacacctcaccaacaaagttttcaacagacaaccagtctccaccctcatacacactaataacactcctaacactattcacactgttaacattgggaacattgggaacactgggaacactacggaaactactgtcactactgagaacaatgataacactactgagaacactgacactgggaacaggataagcagttgtggaagagtgttgagaagtttgaatggtccgttgtcgatgttgtttgtgcttgtggcggtggagttcatgatgatagtgatgatgtttgtggagatttcgttcccgcaccgtccgctgagtgtgaattttctgaagtttagcagtggcgttttcatcacggcgtttttctcagccctcaggggctgctgcgtatcagttgtctactgcagactatgcaacgttcaggtgaacagaggcctcatagaagaagttttagagcccaaggagacgaaaatcgtaaagagcttcctcattggactcttttgcatcattgaagttgtcccaggtgtcgtctggtacctcgcagaaccccgcgtcattcccacactttacatcttcatacaacgggtcagaagtcaataaattttttatcaattttttcaatatcaaattcaaattattatcaacaaattattattaataaattattattattaaattggaattaatcttctgtacatttttaataattttatttaattttattttattataatttatttaatttatttgtgtaccagacatgattattttttttttaattttatatatataatttaattacgtattgttaaaatattgatgtaattttatatgtaaaatacgatttaaatttgggaatggagtgtttgaggccgttgaggaactcggagttgatgtatattttcaagtcattgacgccggggaatctcatcaccgctgaggatttatccaaactcttcaaaaatttatataatctccagtactcaacacaggaacttcagttcaccctcacacacctacacaacatagccaactataacacagtaaactctgtaaacaatgtaaacactgtaaacaatgtgaataatgtggctggaatagattttatgacgtttgtggatggagtgaatgggttaataaagtcgagtcctgtggagttgatattgagggacgtgtttgagaacatatcaagggataagtcaagtgttacggttgaggatttattggagtttgcagagaaatcagggattaaactctctgaagactcgaaactcagactaaactcaagattacctcaagggaaagccaatttccaacaattcatacaatgcattcagtcatcctaatactaattttgtaacatactgtacacagtagtttagtagtagtaaagtagttgggatagtggagtggaatatacatatctagggtgaactccaaagtcaagcgagaactggcccggatagtagtgaggcgggggactgccaaggggagctaattaactatattactataccatagtttattacaatattaatactacagtaagttgggatagtacagtgagaccaccaaatctactatgaatggcaatgtcaagcgtgaattggcccggatagtagtgaggtgggggactgccaaggggagctagtaatataagtatataagaattagttaattcttagcattagcatgtcattggaagtgaaatccaatttattaaacgtttcattcgttacttctcgcggagactacaatatcacattcactactgttatctactgtttatagtgctatctactgttgtataagattatctaaggttgtctaaggttatctacagttatataatttacattggagttggttagaagttcgatggatccgttggtgtatttgatgaatttacgatatggagcggtttggattagaaagtaaaagtcatgttccttcaagtcacatttcgtctccaaccactcaaacaacttctaacaataatttataaattttaattaataaatttgtgttaaataaataaaatacgaaagttgatcgggttaggagaaataaattttccactcccgtaatttctgctgcttcaacaacacatttaccaaaaaataattgtaaataataaataaaataccaaaacggttgcaaattagtaaataatggggtaatgtaactaagtgataagtaggaggtaaaaaatacgttaatggaatggtttggtgagaatgacttggttaatctttcattggtgattagtttaattgctattcttatagcgtcggagccgttatactcctacacacaagttaaccaaaccaaagtccactaagcataactatactaaacacataactaaggaccccgaaggggataactaagtaatgaggaggaagataactaagtagtgaggaatgactaaatagtggggatgggtaatgtgtgtgagcaaagtaataaataaataagctggatgagcggtagcaagctccgtaacgcattacatcagcatcttcttgtgtgtttgattgatctaatctgatcccgccagtggtgggccaggaaattttatggttcccatttttatataaaaacgatttattctcgtgtgagagttcggataatttaaagaagaactggtgtggctggaggttactaaaggtaaaagggtcaggttccgggaactttccgttgttcggaattaccaaaaacacaacaccacgcgaagtctctaaaatttccttaatatagtcatgcaaccagccatactccaccaacacaggaccatccctcaaactgtccaatatacacctgaaacacacattaacactactaattattattcatcataattattgaaaaataattgtaaatttcacgattttggaaataaatgcaaaagttgatcgggctacgaattggagaggaaaattactatctaatctgctgcttcaaccactcatttaccaaattttaattgtaaaaaataaataaaataccaaaaggttgcaaaatggtaataaatggggttagtagataaagctgggtaaaagataccattcgccgtgtaatttgcgtatggagaaccagtgttcttggatattgcagatgaaaccgattgagtcattgctgagatgagttaaaattgtaaaaaatactgttggaacatgccaaggcttagttgactcagtgagaaatgctcacatgatatattacgaatactcaacgcactttgtaatacctacacattaccattagtggaaaatatcctccacactactatcaggagtggaaaactaactcaataattgctgcagtaactacttatttaccaaatttaattaataaatagtaaaataaagtaaagaggttgcaaagtagataattgttgggtttagttactggtaaattgaagtcgcctaactccgacacgttaccatagcccaaaacctttccattatacccactctcacctattataccaattattcacactattatactattataccattatagtattatagtattattatggtattatagtatataagtaagtaactaagtgttcggggtgggtatatgtggaaaaataactgggagagtgcaagctccgtaacggagtaccattaaaattaagtagcatattctctttagagtctagaatagtagaaatttcacacaattcatcggcagtcaccacaggaccctaaaacaaccattaatcctctccaccccaataatatcatcgtaataattattataattaagttaataatgttaacggagtggagaaacttgtagagtggagttgaggcagtgtagagcgcataacttggttttagggtcctgtttctcccagtacactaacaactccataaatcacgccaaacccctcatttacaattaaattacaataatataaaattaatattaataatattaataataataataatataatattaataataataatgtggaaaaaattgtgtgaagattagtggtgatgtgtatgtagttggttgagtggttgttggttgatgtagactttgccttctgtggttcccagggttgtggtttttacgtttttgctcttttttaatttttttaccccggccacgcccgcaattaattttttcggacccctcggcaatagcgttgcggattttagcacagacggatcagactccaacacctcctccaactcaaagtcaatcgaaggtccaatctcactcaaactcactctaggcaacactacaactatattatactattttagtagtaattgtatacttaattaagggtaattatatacttaattaggggtaattatatagctatttagtagtaattatatacttaattaagggtaattatatagctatttagtggtaattatatacttaattaggggtaattaaggggtagattgggggaaatggagtagcagcagaattgaaggttgcaaggaaaaaagagcagcaagaaaaaaaaatttcgctctcggaccagtctactccattgactggtcctcgagcctcctcacacagttcccagtagtattattaactatataactaaatagtatagtagtagtatagttaagagtatattaaattagctccctttaggggtatataattctaggtattctagatatatagtaagatagctccctctaggggtatataattaagtatacagtaagatagtattagtatagttgataattgtgtaatatgtgtgaatacttgtgtttgagtgattgtgttcaagtttcttgggctttaggagtgtaattaagtatcttcggaataacactttcgggccgtttttatacacttttcgcctctccacttctacgctttcctcattgtccatagtgttagtagtgtccacagtgttagaagagttggattgatcgatgagggtgatggtgatgagatgtttgatgttgtcgagtgagattttggtgtgtgttggtcctttgaagatgtctaaaagaatattacgaacggttgttaggtgtcccttttgctgtccaaatcctgaaccctggaccactatcaaaggcctcgaattcaattccacatccactacacattaacacgttaaccatatgtaattactggttaactaaatgtaattaggagttaactaaatgtaattaggagttaactaaatgtaattagggttaactatgactaattggattcctttgagggtttaaaatacgaaaattatctaaagagatagataaaaatgtgggtacgttggttgaaatgttgtgtgggtttgtattgtaatactttgagttggcacaggtcgagaattttcctgttgtacatacgtccgaagccgatgctgattggtcttttcttgttagaacttgcaacgacatataaaccaaagcccaatttaccacatatcaattcacactccctgtgatttctgccgtttatcaacacgttcacggaagaatcagacgctaatttgtctaacacaatgttaatcattataattaagtgtgtagttggggttattggggttcccaggggtgggttgtccgggagtcaagcacatggctatagtaaatagtaagtagtaaatatagtattgtagatgtttagataggattattttagtagtattagggttataaatagggaattttatatttattttgtaagtttaaggtgaggttctaggattttttgggttacaaagtgattttaaaggacgaatttcctaataatttactaataatttcaaccagaattatctattttcagggtaattagtagaaaatttcgctctaacagatggataatagtggttaaaagtaccatggtacagtgcccaggtacctactgttacctcaaattaaacactaattaacaacttttagaactaattttaagtagtttgatgactaaaacatcaataggaacgatttgggattaattaatttaatttccggaatagtcgaaaatttttcatttttcaggaacccaaatgtcacttttgggtccgggccagaatcgaaaaaattcgaaaattttaaaaccccaaaatttccacataaaccaacaaatttaacctctcttaacaccagaaaattataattaactcgtaattaactgtgtacacagtgctacagtgtgcttgaagtggcctggacagtgcatagtgggatcactgtgaccctagtctaagacccttagatactattgtagcaatagtaaactgtactaactatgaaatactaatgtaaaagtgttacgtacttgtgcttgtggtttgattggatttgtgattttgtctgaaggttgagaattctttaaaaatttgatataaatcctttaaaagttgtttggaatcttggttatgtgaggaggataataggaataaaatcggctttttcagcctcggctccaagtccacattatccaaacgagtcccccgcttcactctctttcgcaatatcatctcaacacttttacaccaaatttataatatttatactaattttactaattttactaaatttatagaaattttactaaatttataataattataataatttgatagaaattattgttataaaagttgttatgtggaattttgggaaattagttttctgggtaacagattataaatttttgtgttaaaataattaatattattttttatttgagatggtgtttaaaataaaaaaattaggctatttactaaaacccggcgaaaaatttgtaggtatctcccacccctagctaatcagtggaatatttagttagtggattgcttaactatagaagtctgataatatgttgcagatgaggaggaatgtgttgaggacgatgaaataaactcctacaccaaaaaggaaatttatctcaccaaacgtaaaataaaattaataaaataaaattaattaatttaataaaattagtaaattagtttaataaagtgagaaaatttttagagatagaggagaagatacgggagatggagttaaagcctaggggcgatttaaaggttaattggatagaaacgttgactgttattggcaattcgacacctcaagccaaagaaaatctcacactcctaaacacacaattgtatccctaacactattcacactatcatcagcggtaataattatttagcagtgaactggccatggaatttgtcaaaatcggactcaacaaattcaaagtactctctacacattttaccccagttattcacttaatttgcaaccttttggtatttattttaccatttacaattaaaatttggtaaataagtggttacagcagcaatgtagatagaattttcctcaccaaataatcctattccatatatttaccaaatccactaatttaccaaatccactaatttaccgaatccacaattaatcatagaattacgtgtgtaactactaatttatgttgtagagaatgggaattgcgtttaataggccgacggatttctatgcggagatgatgaagagtgacgagcaaatgggcaggataatgaggcaaattgagcacagagcacaggaaaataaactcaaacttcaaactaaaaaccgtaaaatgattaaaaagatgaaaaaagctggaaaagataaaagatcaaagcagctgcaggagaagaataaatttatcaaccaagtcaactacctgcgaaaacacaagaaaaacctccaagatgatctcaaacatcttatcaaataatttatcaaataacaacttatcaaacaataacttatcaaatgataacttatcaaacaatagagaattctatttgcaacctgataaaaatgtttatttccaaattacgtattatgtattgaattatattttaagcatttggatgacgtagttattgcagtctgtgtaaactgtggagtttacgagtttatcaaagtgttggcagatgtgatcaacttcatctctgttaaacaggtgatagtagcgtttaaagtgcaggtccttagtgggagagtacttttgctgcaagttccaaggcaccagcacgtcctgtgacctaaactccctatacccaacgtaactcgcatcctgctcaaacgacctaacacattgttacaccattaactaagtgtataattaggtaatagtgagaaataccagaggtatattaggataatcccaccggtgcgtgtgcaacgtattaattcccgtattacctcaagcctaaattattttatccaacaaatcctcataatattctaccaaatcctatgataatttagtaactttctagggatagaaatggtgggtaaatatggatagaagtggatgttacctccgctgagtggtggacaggtgatgtatgattgcgattgcgagtgtgagattggcgaagttatctttaaagggtaatttcagggcgttggaaatgacaagtgagaagttactgttgacatgtttttcccgtgcgagatggagtaattcggaacaaatgtcaacgccaataaagtaacagtcagtcctggtacttaaatactttccattaccacagccgacatccaaaatcacactcgatggtcggacactctcaattaccttcactacattaccccaacatccatatctacatttttaaccaattagcgaattgtaaatatatggaatatggttgtttaccgaggaaaatagttacattattgctgcagtaactacttatttaccaaaaaataattgtaaaaagtaaaataaataccaaaacggttgcaaaattagtaaatagtggggatgggtaaataagtaactgaggaactagtaacagagggacaaaaagagtcccataggagtggctatctgtagaaactacataagtaagtaataagtaactgagtaaatagtttcagagggacaaaaagagtcccatcggggtggctatctgtggaaaaataactaagtaatagataactaggtggatgcaagccccgtaacggaatacctggtgtgtgaaaagtgagtggcgatgtttttataaatttggtggacataattgtgttcaaactcctcctcgtcgacattctcactagtaacactaatgatattcttatcacacggttcatcattcctatgcttacggaccattgtgaatcaacaacttaatactatttaaacacttgtaacactgtgatgtgttatggaggtgtgagattggtttgaaagtgtatgccgtcacccggtggtttaccaacgggcaataaccacaataatatattcgtgccctaattataaattgatactaaaatagataaaatactattagcagcaaaatataactagagtgtaggttacgaggacggcttgtatgttatgaaagagtccgagattgtaactgtgtttcggagtgctattccacgagaaacactcaatcgtagttttattcgttattatcaaactgacaacacataaatattcaaaacttacaacaagtgaaataatgtaaagggtattattatcctatagaatattattactaaactgcagcataaatgaataaatgagaagtcaaggggttagtaaatgagaagttaagggattagtaatgagaagttaaatgcagcataaatgagttaaggggttggtaaatgagttaagaagttagatgagtgaaagctatagtactgtgtaagcgttagcaagcaccgtaactaacagtgagataatgagaataagaatggagatgagtgagagatagaagagttggtagaatttggagttgggatcgtaatagctccgatagaaagctttggtaatgttcttgaacatgaaaatgctaatcaagtccgaataaaacaacgtcaaaaaaaagtacttataattataaaatcctataccattcgatacctacacaatcattgtataacttaaaacacttaataattaactctggggataactgagtaaagaataactgagtagtaaataaggaactgagtagtaaataactgagtagtaaataaggaacggttgcccagggagagttttagtttggagcaagcaccgtaacgcagtacccaggggcagtaatgatccattttaagaacattacgacctaacggtctaaaaaattattattatgctaattaccggcagtagtgagcgcgatctggcttataacagttctcattcctacaatatctcaactcgcctacaattattttatcaattttatcataatttaccaaaaaataattaaaaataattgattttaaaaataaaatgcaaaattgatcgggttagcaaatgaaaattttctcacccagacaatcttgctgcagtaaccacttatttaccaaattttaattgtaaattgtaaataaatgtcaataggttgcaaattggtaaataatggggtggtaccgttttgtttacgttcaatacaatcatatatattattcggatccaatttccattcatctatacactattagtatatataacaaagtatatatcccccgtagggaatgagtaaatagtaacgaaaatacctgtaatgaagccgggttcggtaatacaagtcataataaatgaccagagtagtaataatcccaaaacatgaactgatcaattattaatccaagtaaatgtttacagtagagaagatgcgtgatggcgtctttagtgtatttgatactataatttccaagtccaacttcgatctcaaacgtcggcaaacatacaaactacacaattctccacaatattcacactattttcacaaaatttacacaatatttatactattttacaaatatttacactatttttacaaaatttacactattttttcaataaataaattaattaagtagtggagtacttcgaggtaaattgtgtagatggtgaagaagatgagaatgatgaactgaaggtgattggtgtggtgagaggcttacggaaactggcaaatttcgtaaaactgatttccccaaactcatccccaaatttccaacacaattttcaaccttttcgtcatcgcaaattatttattttattcacttaatttatttattttattcacttaatttatttattttattcacttaattagtttatttttttacacactacaacatcaccagaaattgttttacacaattcccaaaattttttaaaatataaaaaaattataaaataaaaaaaattataaaaaattatataaaaataaataaaaatgactgtgaaaaattaataaaatttaattattggaagattggtgggattttgtgtattcagggcagttggcttttttatggcggactgagccgcagaaatgacacccggagcctttaggaaatatacccttgggattctccggacattgcgatgataaatgacccctctcaccacacacaaaacaactcgcatacggtaactcctaaacatatcaattattattatataaatatttaattagatgaataaataatttttacttggtttggaagtgtacaatttttgagtgtgtgattatcggagccgcatttgaagcagattggctttgtgtcattttccttacaatcttccagtaaatgtccccttttccggcctaaaaattatatttccgttaatcttacatttaaagcatattttccttattcttttcctgcgtaattttttaattttagttaatttcgaggatttagttaaatttttatttttggcgatattctgttgttttggtgagatttgtcctccagcggttgttttcccctccaaggccttgtttaattttgaaattttcgcccttaaaagtttaattctggacttacttttaggcttgtcacttttaagctccgccaccctctcctccaacacatttttaattttttccggcccccagcagttttcataatttcttttataccttgaactcatcaaaatattttacatttcaaattttacgcaataaatttatcacccagctgacactacaaaatggtaataataatgtaaaaataatgtaaaattatgtaaaatgaaataaattaatgtaagtgtaaaatggagtaaaatagggtaaaagtgtaaaatgaagtaaaatgggtgaaataatgaataaagtgtaggattgagaacatgtatattatacgataaaattggcatttcttggtcccaaagggtaaaatatattctcacacatacccattctcccatcactaactcccactaaatcctcctaataccttaaataactctttaaatagtactcttaatcccttaaatactactcctaatcccttaaataactctttaaatactactcctaatcccttaaatactactcctaatcccttaaataattcgttaaatagtacttttgactctgaaaaactccttaaataatcctcttaatcccttaaataacccctcgtaactccgtaaataatcctcttaaatcgtaaaataattgtttaaatactcttaacgcatgttactacttggtgaagaagcttgtgtaaactgagataagtgcaagggtgagatcatttttcgcctatttcgttgatgaatttggtgagcatgtcgttgagtgagtagtcgtcttccttcttgactgtgaggttattgaactgttcatccagctcctgcgtgttatactgcacgtagtcactcccaaagtcatagtaattgtagttattggtataagttggatcgtcgtcaatttggttataagcctcgtagtcgtagttgtagtaacccttgtagtcatcctccacaaatcccatgctctccacaaacccatactcatccacatatctcttgtactcctccgtatatcccttgtagtcctctgtatatttgtagtcctcggtatactgtttataatcttcggtatactgtttgtagtctgggaattccttgagttggtattctttatactcttctgtatatcctttatagtctcctgtgtactctttatactcctcggtatattgtttatactcttctgggtaccccttgtactcctcggtatatggtttgtaatcttctggatagggtttatattcctgtgtgaatgttttattgtaataatcgtaggggtagttattgtaatagttgatgtaagagttttctaggggtttggtgggcttgggttcggaggtatcaggctccacagtttcagtcccgctgtccacatttttactactttttttcttcttagtagtgactgtagaggccaggttaggataattagtgtaatattgttcatcgtggtagttttcataggcgtatcctacgaccgggggtactgtgcccatagtgttaacagagttcacagggttaacagtgatgacattggaaatggtgtgcggattgaaggtgttaaccgcggtggaaggactggtgtaggtagtgttataaggattaatcgaggaataggaataactattaaaaggctcataaagcggttttaacgagtcatcatacgcattcatcgttaaattcggtaagtcataccacataccattctcgtcatctacacatttgtcaactaagtatatggttaagtagctccctctaggggtattatagttatatagttaattagctccctctaggggtattatagttaagggtagtaaggtagctccctctaggggtattatagttatataataaagtagctccctctaggggtatatagttatatagttaattagctccctctaggggtatattattagctccctctcggggtatatagttatataataaagtagctccctctaggggtattatagttatagtatagtaagttagctccctctaggggtattatagttatagtatagtaagttagctccctctcggggtatataattctaagtatatagttaagtagctccctctcggggtatataattctaagtatatagttaagatagctccctctcggggtattaattaagtagctccctctaggggtatataacattcttaggtatagttagatagctccccttaggggtatatagttaatagtattagaaatagctccctctgggggtatataatactaagtatatatttaagatagctccctctcggggtattaattaagtagctccctctaggggtatataacattcttaggtatagttagatagctccccttaggggtatataataagatagctccctctgggggtatagtaaaatagctccctcttggggtatagtaaagggtatgataggaaagagaattaccttgtttgtcccaagtggttttgggaggtttagatgtggtaacagagccttcaactgagtttgtagtattagtcgtgccactactcacactattactgttgacagtgtcaacagtgttggcattagtatttgtattgttagaatcgaatgagttaccggtggtgaaactatccctgaaagtgtctggcccgttcatcgtatccaaacagtcaaactcaaatgacgtctccaccaactcctccttctccttgtccacaggatccaacactttttcctcctccttcacactatttactctgtccacactaactctatccacatttactctgtccacatttactctgtccacatttagtctatcaacatttactctatcaacatttactctatcaacatttactctgtccatagtgctagaattgttgattctctcggcagtgttagaattgtgtagagcgttgatggcgtttgaggtgctcatgtgtttgaatctggagacgtctctgagttcggagggttcgtgtatgaatgggcagaagtacctggagcacttggggtatgacgagcactgtttagtcttgtagacgagtgggtgataaagctcctcctccttcgagtgtgcgaagttacagttcttgccccgggtacagcgcctgtaaagtaccattttccgcgactttttcacaaactggatattcggacacaggtgagggcagtaacttatctcgtaagggttcctacgctgccatgttaaacagtgactcttctcacacgagtcactgttcgggcatttattctgatgatgcttcgtgcaaaatgatgttctaaacgttgccaactcgtcctccgtcaataccgcatgctccctgtccaccgttccaaccgcatgattcaagtttacagaattgttggtagttagggaattactgtgattggtattgacggaattgagagaattaagggaattggaatgattggattgatttaggaatggagaaaagggtgagaaatcatgttcggccttgtcaaaattgtcgttgttcatgtttttgtccagactgtggacggagttgagggagttattcatgtttccgttgagactgttgaccgtgtcaaccaactcatcaatgttattcaccaaacctgaacccaccacgccattcacactaactccaggagtattaccactagcagttgtaccatcagagccggaattgttactgttagcactgttagcactgttagtactgttggaattgttagaattagtgttggaattgttggaattggagtgggagggattgtaatgggagagattgagtttatgtgtgagattgagtgtttcgtgtgtgatatgccagtcatgtgtgtttttatcaggttttttgttggctctgaaggccgtgcctttcctgggtgcgtcagggagctgtttcggcttgctggcagtgactgccttgtaagacatcacggaggtggccgtgagtcgtgacggttcctgggaatttgggcacattgcgatatcaaattaactcgtgggaatcatttgcgattactgaaatcaaatctcaacgcttcatctatattatttataataccccaaatacgcgccccaaaaacataccccaaaataacccacacaattactcatacaaacgctgctaacacaataacacaatacaaataatttataaaataatattaacaacaattcactttattttttcctgatttaggcaattttacatgtagtcacccccacccctttggtaacttttagtatcgctaagctaattattttaccactgtagccgaaggtaaattattcaataagatcgcctatttgtgatccaagtatccgcaaccttgatccctccaatcttcatatttaaccttaattacagtttaaatcgggttactttctgattaattgggtataaataaagtattcaagagtttataatagtctaccagtggttagggccgaaattggtcttaatttggggaaattttggtccctggttggctccccaaactgacccaaatccttctcaatcccctccaaatcctctcaaacctgtccaaatcctctcaatccgcttcaaatcctcctcagtccgctccaaatcactgataattttatgtaaaatattgtagtaaattgttattctgttgattatcttcagaagtgatgagaaatcatcaattttaagagcattagacatttacggcattgtgcatattcataccagtaaccactactatacacatgaaaataatacaattaatagtatataacatgtataaatatggtatataatatggtagaatcaggggtagaatgaaaagatggaatattctagttaatgaaataactggcaataaaattataatttgttaatattttaaaatttttatttaattaaactaatgattcactggttttattatttgtctgtgttatcgggtttcacaatttttatactccataacacaatattattccaatattattaattattattccaacattattaattattattccaatattaataattattttaatgatgttgtgtaatgttggtaggagttcggtgtatttttcgggtatattgaggaaaagtgtgcctgcgagattcagttatttaaacaacagtaggagatatttcgggtcttacattgaggattattacactacgaatcatgccgctactggattctcctcacccctcagaaaatctttcgcctttctcatactcattgctcaggtacgttacggtgtcaggtccaacggcaccagttatgtacctacagttacccaccccaatgggactctttttgtcccttgtttactagttcctcagttactccgttacgcatccccattatttactaatttgcaacctattggtattttatttattatttacaattattttttactcaaaagtggttactgcagcaatgtggaggatattttcctctctcagttttatatcaacttttgcatttttttacacaaattcctaattttttcatagataatgataaacaatataaattatgtttaatttaggctacattaacatttggcgcgttgcttcatacgaattattattttactgggaaggcgcttccgaaaactgatgggcagtctcagctctgctccgattccagataattcactgccaagtcatcagtttatcattctaactgcatttctttaccgctactaagataatattttaagtattttaatacgttttagagtaaactattatagcgccaattgcaaacgttagccccaaacaactcgccaatcccgctgtcttcaccacactcattttaaaacccttctcctcctcatctaacaatattactcagttaatatagctaatagtataattaatagtatagttaatagtatagttaatatagctaatagtataattaatagtatagtggatagtagtgttagtgtgtaaggtgtgtgttacaaacgtttgatgtaaggttcgagtgaaaaggtgtggcagatattgtgagattgattatcgttgagggtgacttgatagttggttgtcatttcttcagttaaagtctcaaagtccatccaatcagaccattctccacagttatgcactttaccgctaattaaactaattgttaacagatataatatcagtttactcatttttaaactttttctaatttgaaatgattcattaatctacacaccccattatttacacattttgcaacctattgacatttatttattatttactaattaaaatttggtaaataagtggttactgcagcaataattcggggtgagaaaatttatttctcctaacccgatcaattttggcattttattttttaaaccctattttattaattatttttcaataaattgataattaagtgtgtaatgataaaagttagattaaatcaattagagattggtggtggcccagaaatcgttatcatcgatttctatcctgttttcgtcatactcttcatcgccttcctcataggcatactcatcgtcaaagacctgcccctcatcagtgaaacccgacgggattcgagtcatactcgggtctctattaccactacacactcatatacacaattttaacacaattatatacacaattattataatatatacaactgtaataacatatttaactgtaataatatatttaactgtgataatatatttaactgtgataatttgtataatagtgttgtgtgtatgacttacaatttcttggcgcctaatgcggcacctgcgataacgagtataactccaagtgcagcagaggcacctttgacactctgaccaattctagtctgtttaaatccacccgtaaatgtactttcttgctttccagtcttctctttttcactgtcaccgttgttattaggttcttgtttttctcttgatttacctctagacccaacagaaccccctgagcctcctgaacctcctgagccaccagttgatcttaaaactgatgctgcaccaacttcgttgacactactctcactagtgttgtttgaattgacacttgggttattgcgtagtaaagtgtcgattggagtgtttttgatggattccatctcctggtcagtaggtgtttgtagagttggttgctcaggatttggcacaattgcttccaaatccaccattccattccttaaatctaagtctggaattctatgagttgaatccacctcagtctccacctcactctgaattatcggcctgtcagtcactccaatactcaaagtctctcctctcacctccttacccaattctttattaagttcattttgtgtattattaagttcagtttgtttattaagttcagtttgtgtatttgaagattcggtaggtttaggttctggtggaattggtggattttcactctttagtttatttaactcagctgtttgaacgggtttggatttattaaaatattttttaagatgttctaaagtttcattggtatcttcagaccaaagtgaggcgtcattgataatatttgctagagattcaccggcgccaaatttggaaagaacagtgagtaaattactgttagttttgcgtaatttaagttcctgggtttccttaattagtaaacgagcgtcacggtctaggacttccttttgcttgcgttcaagctcaagattcttgtcagcaagttccaaaaccttaccctcaagttctgaagtcttttgctccaaagacttttgctttccacccaattgctcagttacggattctaattgtgtgttcttttctgataatttaacttcgcactgggatacagcagattccttctcacgaagcttagattgggcttctttgtgcaaatttttcaaagtgtcgtactccttctccttttcatcgtaacggtctgatttcacctttaattgggattctaaatctgatttttcactcttgagagttgtctcacgaacaacacattgggataactcatttcccttctcagttaattgggattttgcagttgaaagttgagtctccaattcattatttttagcctccaaagttgaatttttctgcttctcagcctcaagttcagatgtacgagtcgataattctagtttaacagtgttaagatctgacttggtacggcttaactcagacttggtgataatcaaattagattctgctgatgaaagcataactctattggctgaaagtactgatttattatcaagtttcaactcttcatatttagcgttcagtttagcaattgtctgctcaagctcagtttccttatttttcaattgtgtgctgacattcttaatttcttcagcctgctgtgttcttatggtttcaagttctcttaacttgtcagtggcgagtttttcaacttttgcctgtttttcatccaattctgaagacctttgggtgtttttgttttcttgaattatagccaattggcgcttagcctcaacttccctaccaagtctctttaccttttcatcctccaaaagtaactcattcgccttatttttctgggccttttcagtctcgtctgcctttgtttccctaagcctaacggcattctcagcttcagtcaattggagttgtctagcatccaaatctttttgcaattggtctaatttcgactgcaaagcagtgagttcagcttgtttatctgccaatttttgggatagctcagattgttcttggtccttcgtcctctgttgactttccttctggttcagagtattctctcgagattggagaagtgattgcctttggttctgttcagactctgttttctcttgttgtttttgctttttgaggacttcagcctcacgttctgagacacggcgttccttatcctttacgttctgatctctagtacccagtgattcttctttgagtaaaagagtcttgttaagtgcggtaagtctagcatcctcgtcctgaaccgacttcaacttaatggtgtaagcatccatattcgcctctaattcgctttcccgtcttgagagactagcagcctgagccctattagattctagtagcctatttgcctcctgattagcagcagttgccctcgcattttcttgttttacagcctcattttgctcctccaaagttttagttaatttctgagctgctagattctgttgttgaagctgagctttgagcttttctagttcacctttagtatgtaaatgaccagaaagcaaacgctcagcttctgcgtttttagcctccaaatcacttttaagggcgtcaacttctttttgtctattattaattctctcctcagcctcggcacttttttgtttatcgtcggcaatttttctatcaagttcttcctgactcctcctaatttggtcgtcatgtgcttgtctacgttgctgcaattgttgctcctgagctaaaatttcagcctcccgtttttgcttttcttcagcgattctggccaggctctcagtttcctgttgcttaatagtagccaagagttctgtctctttagcctgcctagccttttcagcctccttttccttctccatatgagccaattcgtcccttctcagctgctctctggcatcatttagtaaactttgctccctgaatagagttttgtggtcctctgcaacctcggcaagcttcaactgatattccaattccttctctttcaatgttttatccctttgttcaaactccaaagtcttacgcctaacatcttcagtatgctctgccaacttagtattcaaaacatcttgatcttttttcaactgtttagccttggagatattttgggcctgagcaattaaaagcttattttctctttcttgaacagtgttttcttgcttcttaaggtctaaagctctctgttgattttttttcttggcttcttcaacagaagcggtgtcaagctttaatttctcttctttttgttgaacctcaccacgctggcgttccaaatctgaaagttcagcttgtactctctgggtttgctcagttaaattctgttgttgggattggagtgaggctgctttctctgtgtttaatcttatttgatcttcaagatttttttgtttatttagtaaagcactggatttgcgagactgctgcttagcggtatacttaagtatataggcctgattcctttcttcctgatttaatctttcaatttcctttttaattttttcattttcagcctcaatatccttctcttgcttcttcaaagttgctgccaaggtttcattttcagagatttgtttctgtaaattcttttctgtttcgaggatctgggtattcttactctcatactcagatttaagtctttcttgttcctgagtcttggtggcgagctcatctctttccctatttaattgttcagaaagtttggtatttgccaatttttctttatctatgtctgcttgaaggtcctgtagcctcttagcctctttggaattttcaaccttaagttgatcaatcttttgagattcctcatccaatttttgctcgcgttcatctaaaacggctttagcagcttcattatctttcttaattttgtttaatttggtagtttcttcgctgaggaacttgccataattgaccatatgttcctttgcggcttcgttttcttgtttaagtttctccaacctctgagtttcggtgttgatattggcctccaataatttttgttcctgctttttagattccagttccctttgctcagaggctaaagacgttctttgtgattcgatgctggctagtaatcctttattggtctccaattcaactttaagggcttcctctctttgagtgaggttttcatcctttttctggtgttgttgagttaaagttgcctccttttctttaattctggccaattcctcttctaattttcgatctttgtccagaattttggtcctttcactttccaagtcttcggaacgtttagcgtaatctttttccttgtcttgtaaagccaagcgttcagcgttaagttcatcctgtttcttgtgataaaacttaatatcttcctgtaattcaagttccatttcggccaatttatcagtttttcgcttataattgtccttttcacgctctaaatctctggttcgtacctctagattagaatttagagaatcatacttggatttttggtcgtctagagcctgcttttgcttttcaaattcatcatttttctgattaaattccttaatttttcgatttaggtctttattccgatcgtagaacttcgcatatttttgcatatacgcattgtaaagattctccgcttcttcattctttttatgaagttcgcggtttaggttaacgtatttctctagacgctccttcaagatctcctgttccgtctttttgggagtgtgacccttcatgcgattcatcagcgcagctgctccatcaccgcagtatctatactgggtgttcccgctagagaaatcaagtgcaaatctgtactggacattgttttcacagggggaccagtcagaccaggttactgtgttcatgaggaaacaagacatttccaagtgttgcttcccattatctaagcatttgatggtggatttagtggagcaaactgagacgtcttcccagcttgtacaggtttctgagctggttccagcagcgattacagtcctctgagcagtggtatcagctgctgtctgggccaaagaggaacgtagctctgaggattcgggcaccttttccaaggagatgaacgagtccaaatcaccccctttatggaaaaagtgaaggtcctcaccatatctattcaggcctagtggaagcacatctttagcattccaagctccgacacctatatttttatgatatatgtgtatacataggtatataatgggtataatggtatgatgggaataaggggataagtactggggaagaatgaataaatgtggagaatctaacctggaatgaaaaaattaaatgtaaatagtgacaaaataagaaatgtcactccgaatatataaattttggctgaaatcattctagtgcgatattgttgattcttttaatcttcattttaggtttttgtagtaaatctgaattaccgatttacggtaactggcgataatcttttgctcggtaactcttcagattcgtgccaataaacgacgataaaaatattctttgaagttaaaaagaatctggcctttaaattacttttttaaatcgaacgccaagtgccaattcttcctttagatttggttgtaaaataaaatacacattagtgattttcccctaaaaactaaaagcgtaaattcacagtgattggctttcttcctggaatccagaaaaaacttcagattccggtgatttactgcaagaaaagtacctcgcgtaaatttgtactgtccaaacgataaaatgaataaaccgattttcgagtgcttttgatggaatcaattaataatagaaaaaagctctttagccttccattcctcaaatggaatctgcaatacgttgcattggcgacgtgtcctgggatctcagccaccaaaattatcatggaccaaaataaacataaaatgcttaaaaataaaatataaattttctacaaaattattctagccgcctagagagcagttccgggcctaaattttcccgggcctaggagccctaagcctcattctcccaaacatcctccgtgatcaaaaccgccgtttccacctcttcacaatccccaacctgagcatagtcaaaatcaatctcgtccaattcaatcacttccgcctttctaaaacatttttatcaaccctctcgtaacattattttatcattgtactatttttacattatcatactagtgttatggtagtattaactgtgtatataaatagttgtataaaataatagtatggtaatggtaagatatggttgtgaaataccgtttagatgtgaagtggtagcctgtaccagcggctccaatcgctattaaggcaccaataatacctccggcaatctttgcacctctagaaaagttcccttcgtcattctcatcctcagaattttcttcgtcgtaataatcctcagcttcctgatcaaatttatccacaccatcagtagtctctggttcatccatatcattattctctggttcatccgtatcatcagtgtcagtatcgtctaaatcatctaaattatcactatggtctgctccatccacatcaccatgtgcttctggttcgtcagaatcgtgttgtttagtaggtttaaattcaggagattgcgccgcaacttcatggggatggaccggtcttgaggatactctactatctaattcttcactgttctcatatcttttcgcgtcctcagtgtcatcactagtatttccttcattttcatgagtggaatcaggtaatttaaccgcttgaccagtatcattgccgtcactaaattcttcatcatcatcactaaattcttcctcatcatcataagtatcagtatcttcttcatgagtggaatcaggtaattcgatcctgtgactggtattcatagtattatgagtgttgggcgtatgactggtattgtgtgattcagagtctaaaacttccgctgaaccagaatttttcatactttcagacattttacccgcagattcttcaggctcgggaaccaaaggtccaccgggtggtaataaagtaggaacccttgacacctctgaaagtctagtacttgatttaatattatcaatatttgactctttagaaccatgtgccaactgatcatcgcttgaaatatcctcaccacccttggcagtgctggtttccactttattaaccttttcatcatgatgagttggtgtgttttcagtactttcaggatgatgagttgatgtattatgagctttcaaatctaactttggatgtggtaaatggagattgttcattgatttgttatagtccgagtctgaaactgaaacggaatccttaggaggaatattaaattcaatggaagaatcatctcctttcattggagataaacctgattccgggaaatcgtgcccaccgaaaggaggcttgatttccacatcactttgagaaatctcagattttagtcccccagcagatgctggaatcaaaggtaactcattttttccggtctggtccgtagaactgttccgctccacattttcttgttgaatttggagttgttcggaaagttctttctctaacaaacgtctttccctatcagaatgttccagatctatacggatttgttctagttgtttttgcaattctgaattttggcgttcgagctcagcatcaaactcccttttttgttcttctaaggccatttggttttctgatatgattctattctgctcttcctgtaatctgattctagcctgttcttctgattctttctgggccttgagtgtatcaagttcagattccaaacgaattctagctagttcttctgattcttttttagatttgagtgtatcaagttgttcctgtaatttgattttctcaagttcgtctgattctttttgggccttgattctatcctgctcttctaattctttttgcatcctgatcatctctttacgaagatgttcttgactctcttcccattttctttttattgtttcttgttctctattccattcatcacgaaggcgcgctcgttctagttcaagaattttatcaggatcattttccttctgaatttggagttggtcggaaagttctttctctaacaaacgtctttccctatcagaatgttccagatctatacggatttgttctagttgtttttgcaattctgaattttggcgttcgagctcagcatcaaactcccttttttgttcttctaaggccatttggttttctgatatgattctattctgctcttcctgtaatctgattctagcctgttcttctgattctttctgggccttgagtgtatcaagttcagattccaaacgaattctagatagttcttctgattctttttgagatttgagtgtagcaagttcagattgtaatttgattttctcaagttcttctgattctttttgggccttgattctatcctgctcttctaattctttttgcatcctgatcatctctttacgaagatgttcttgactctcttcccattttctttttattgtttcttgttctctattccattcatcacgaaggcgcgctcgttctagttcaagaattttatcaggatcattttccttctgaatttggagttggtcggaaagttctttctctaacaaacgtctttccctatcagaatgttccagatctatacggatttgttctagttgtttttgcaattctgaattttggcgttcgagctcagcatcaaactcccttttttgttcttctaaggccatttggttttctgatatgattctattctgctcttcctgtaatctgattctagcctgttcttctgattctttctgggccttgagtgtatcaagttcagattccaaacgaattctagatagttcttctgattctttttgagatttgagtgtagcaagttcagattgtaatttgattttctcaagttcttctgattctttttgggccttgagtgtagcaagttcagattccaaacgaattctagatagttcttctgattctttttgggcctttagtgtagcaagttcagattgtaatttgattttctcaaggtcttctgcatctttcttagatttgattgtatcaagttgttcctgtaatttgattttttcaagttcttctgcatctttcttagatttgattgtagcaagttcagattgcaatttgattttttcaagttcttctgcatcttttttagatttgagtgtagcaagttcagactccaaacgaattctagctagttcttctgcatctttctgggatatgagtttctcttcatttttacgccttctttctcctcttttacgttttttatcttctttattacgtttatcgtcatttttgcgtttttttcctccgttattacgttttttatcgtctttattacgatttttggataagctggaataggtggtgtcaacagtcggaactttaggtgattcaatctttttatcagttgatttatatccatcaataccatttatatcgtggatctcctcaattttgtgatcaattttaaaatcggctgttgaatcctggtgaccattatgggagtttttatgtgaattagatcgatcaggatcgaattccctggaacttacatttaaccttggtagttctccataatgtgaaccggtgccatgtgagggagcagaatgttcaacgtaatcgcagggtatagtttgtatatcaggctggtgaacatattcttcggtatcttttggccccgtagttttaaaaaaattctccatcctttcccagtcagattcagtcaaatcagctcttttgttagaaagatcaggtgcttctcctcgccggtacttacaaagccgaattctggtcttggtatttttgtcgtcacaatctctaaatagcccccaaggcccacaccgaaccgcagtgtcagttgaattttctaacaacgaacttggaagttttttggtcctagcaaatccctttacttgggtggttgccactaaatatatgttttaattgaatttaaacttacaaacaagaaacaacagcgcatgaagtttcctcatggtgatgaagtttttacccattttgatatgatttttatttaaatcggttgtaaattaatcagtttagttttaattaattagtttaactttgtttaataagtttagtttagtagttttagtcagttttaagcgttttaaccttgtagaatatttgtcaaatatataatctgaatgattatttacattcaaaaaacaactaatagtctgcatttgttagttttaaatgaacttttggtcaggagctgcattcttctgattctgagaggtagtcattctcagattaaggtggcctaagtaatatggccagaatattttaaaatggccttaaaactcattttattcccaataattatggaattaaaggccattataaagtactctgtgcattccgacatgtgtatgtaagtgacaaaatgattctatacactaatcccaaatacaaatgtgtggaatcttctagcctctatgcttacacataatgctcaaaattaattttttacaacttttactttcatttttattcgattttatcgtttttataacaaaatattaagtaaattatcttgtttgcttaaatgtgtggtaggaatttgagaattttaatttaaattgtttcacattcgtcagtgctttattttccttaattttttataaattttcctaaccattagaattcatttaacgctgttttattcatcagatttcaaaaatgtcgttgaatcttcagaagaaactggacgagaaaatgtcaagtgaatccggtaccatgtcgtatgtttgactagaaatatttaattttagtctttctcaatgcatgagtaaacacgcttctgagtttactaaggcggccgctgagaaacgtctcaagtttcaacttacacattttacacatttgtttcaactcagttaataaaacactattaccttctccaaataacataaatatctaagaatagaatgtttttaacaattaaatgttgatttttattgattaagtgtttagggttacgaataaggacaaggttgaggagttcaccggtgaagggaccagagagagtgagcctttggagcccgtaaatgaaaaccacttcgtaaaacctcagcagctataataacttaattctctgtaaactactttaatcccataatctcactaatacacttttatacctaacatacacaatctataccatgtataaaggtgtaatactatactgaggagtgtattttatcaagatgtggcggtcctttggaaatatgtctaaagaacctgaagatttgagaatttgtgttttcatctttatcaacttttgactcttgtgaaggcgagaactttttcagggcactggttagtaatcgattaattttaggcttagtatatccgtaggagtgaatgcttgctaaaagtgagctcacctgtggtcttgatagttttggcactattttaaacagtttttcatataaagcccttgcgaatttgtcaaaatcctccgatcttttcttctgggataggcttaaaacacacttgacaacctggtcgtcatccaactcaagctccggaacctcgtcaaatacatcaaagtaatgccatggctctaaattccttcctttaacttcatctatcaccgacttatcattgatataccctcttttaatgggtaataataaccttaccacatcctacaatcattcatacacaatctacactagtacaatatttatagataaaataattgcaaaatattcttaaactgtaaaatcgtgtaaaatagtataaattgtgtaaaagtgtaaaaaaatactttgttgtttaaattgtgaagattgtttaagataatttggtttaggttattgattagaacttgattgtttaattgtgatttagtgtacaggttaaatagtgtgcaaatttgggaaggggccatttggtcgatttttgaatttacgtgtgtaaaaaggttagaaactaagattttcttataactgtaaagacatttacagataatcacaagttgtttagggttaaattcttgatccaatagcttctgctgtaccttacccaccaacactgggaaaaaatgctcattcctaaactttgtgaagaagagtaaaagttgaactaaatctaaaggtttgtaacggtccttattggagtttaagattggaagtagtttttgcaccagcctaactggatttatatcagttttatataatacgtaaaaacagtatgaaattgtcctatctgttagggccaagtaattccagtttattgctcttaaatatctttttgcagccaagttcttcagcttattttgatcattaaaatacaacacaaacttactcagaacgaataactcgaaattaacatccgaaaacttatcctctgacttgttcattttgtttacaaaataagtataaagtttatttacagtgtgaggatgagagtaatttgggttagaataatatgtaagagtgtttagaacatcagaagtggtgaaattgcaagtgcttagatgaattctcaggttcaagtttaaaaggtcagcttgatcttgatttaattttacctcatggttattcagaaacctcatgaatgagataattgaatctttaggcaactcggtgatcataccaaagactccctttattattggagaataaatgtgctctggcactaaatatgtagaattgtgaatatccttcaaaaccaacactaaatctttcaaattatattcacaaccagcaaagatatttgaaagattatccaaatcaaattcgatgtaatttctaatctttagcaaatatctcagacaattaactaaatcttttcctgggtaaccgcttatttggtttaaattagacataatatgatccataaaaccctcaattagactattacttgacaaataaaagtgataaagttttaatactttaaacaacgagttataattatttattatatccgtacaattcatgatagtagaaagtgtttgatgtacaatggaataatctttgataaggcccgtacagtataataagctctcaacagtgttgatgtcaggttttaaacgaaaatccacaattcttgaatataattctgtctgtagttttagtgttaattcattattattcagttttcttagacataatttcgttatttgtgttaatatttcagttggtatgtaatgaatatcctttgaaaaatggttgaggatttcactcataccctcaggttcatttagtctataaaaaatttccactgacttcaacaaagtttcatagtcaacaatctggcgtttgaaattaagtttttttgaccattctagaactttttcgtcaaccacaaacccgtccctgatgacaaaatcatgtaacttttctatacccaaattcaactcctgtgaacttgtaaaacttctgaaaacgcggaattttaaattttgcggtatttgtccgttcaaatgtttagtaggcgggaacctggttatctgagtaaacgatttactattcaacattttgctaatgagcattttgagattttagtgaattacaaagtagtcgaaaatgtgtgagtggtttgcttgtgtcaaatttgagaattttaagtctttatatcctaagagtaattttgcatgaattagggctgagcgcattgaatggttagaatttaaaatggaccttgcggtattcggggacttttccattaaactgtcgatctttttaactaatttaaaaacgtccaacattgacatctttttaatcatataaaacaaatcattgttcacgattttgccgttgtctatcaacaactcaatatcagaacgaggtcgcttaaactctgagggtaattctggaccagcgataggtactgggtgtgtcagaacaggcaaattaaccaaccctgtaagattaggtactgggggtggattatggatgacagttagtggatttaaccctgataggggagaaattgtagccaaaggaggtggtggaactggtggagttggtataacaggagggattggtaatgtttgaggtataggtattggatgtgcaattggtatgcctaaatttggttgtggaataggtagaattgggatctgaggtggaggtggtggtataactgggccttgaaattgcctattatcagggataactgatgtaggtttgtccttaagaaatattgaatctgatgttaattctgggtatttctgacgataagcatcatcacagaaatcaacctttataggtcgacctataatattcattataccatcatatgcattaatatactgtaatagactattaatatgtatgtgtattgtatgtgatacctcgaatttctttaccaatgagtcttttaaaggcttctatacactctgcttcagttctatattcaagatgggcatagcctctacttctgttagtatgaggatctcttcttattctaaaaataattaatatttttaaagtaataacttacgaaaggtatcgaatttgaccacaaccatgaagaaacgcttttatatcatcttctacggcatcaaatggtaaatttccaactaaaaataataattattatttaataaaattaccaaataattttatgttcctttcccgtatattcatctcattttattaaaagaatattctacttccattatggatggggaatgaaatatattttgtaatacttttcactctttaaactgtttaattattttaaattccaatctctttatacttttttgaatcggttttacaacatttaaccagtttctatttttaattctgatgttatcaagtttaaaagttacacatttaaccttccattttgttttcaccactaatttgactaatttcaataattttccattatgttgattgatagagcttaaataatggccaagttgcaataaggaagtcgcaagtgtaaatgcctcttattagagcgagggaaaaggccattaagcgtggcgtaaaacatgaggctgttgtacgtagaattggaagacgtgttcataaaaggttcagatcatggtctcagcaaaggtataaagatatcctaacctttgatttataggacgaggaagttctggatgcccgcaaaggtatcgttacatagtcctcttgacttgatggatggatggctattatcgtccgctgtgcaaaaggctgcaacccttaggaaacatgatttgaaactttggtatctttttaatatttaaaagttgataggcatggatttggtaacaggcttttggaactttctcacactctcactggtcaacaattaggttatgtttattacgggtactactatttttcagtattcaatacgttcttctaatttaactttgtgtattattttaggtttggtaagagtcgatttttaaagcctagtttgtatgaggaaatgatgaagtttactgaaccgatgcttccaaatttaaatagccatagcctgatgtgtgttgcatggtcactagcaagggtacaaataagaaatgagcagtttctctcaagagtattaaaattatcttattttaatttttagtattcgattgaagttggatcaagattagatgatatcaggactacagatttaattaagatttgtaattcactttcaaaattggtaatcccatacactctaccacagttaactatatagttacccatataataaattatatatagtaatggtagaaaatgtattaggatggttatacaaattatttgaaggaaaggttatctgagaagatggttgaaaagttggaatgtttgtatgcacaggattttagaaatgcagttaaccttttatcaatgattcatttatatgatgagaggacccaaatttaccttttaagtcgtttttccaagtaatccattaaataataaatgattatttaggatatttatctgtgctaggcctcagcatttgcaacaagcttattgttcagctgtcgcagttagagttctcttacaaaaagtttggactcaactagataaatcagtcaaagcattttatacgcgtctcaggtattttatatatataaatttctgtatttcacattttatacattagtatgaggaaaatacagcaatgtttgagaagaccttcggaattacagtgggatgtatctaatattcttgcaaagatggggatacatcatagaaataccttctactggggatgtttttggatagatattggagaaattaaggataaatcaaactgctggttcatagatggaccatcctgcttttacacatcgaccacactatatacgaataaagtcaaattacaacataggtactctttatccccttacttagattaactaatagcatatataatggtaaactgtatatactataaatatgagtacaaggtcggattaggatattgaataacctcggatggaatataagaagagtgcagtggtacaaatgggtggattatatgaataatacagaggataaaattaactatataaggtattcatttacacattttttataagaattttctgttatttcatgtaattgtgtaggaaattgagggaatctgaatgtttaggagaatttatacaagaggaccaacttgaccctctagaaattaaacaaaaacttgataaaattaaacaaaattgtgttaaacccacttaaactcgaaatatttaatgtaatatatatagtacttagtagaataataatgatgactccccatcagtgattccatttattattttaatagtatattaaaatgttcgcgactaggtaagtggaaatatttaataattataattgtgtagaagcgagtacgatagaggtgttaataccttttcgccggaggggcgactgtttcaagtggaatacgcacttggagccatgaaactaggtagtacagccatagcagttgcaacgaaggaaggagtaatttttgcctcagaaagaaggtcaaattcgccccttttagaatttgtttccttggaaaaaataatggaaattgacgaccacatcgcctgtgccatgagcggcctaatcgcagacgccaagactcttgtagaccacgccaggtcagaatgtgttaaccacacatttgtatataatgaacgcatgggtattagatcatgcgttgagtccatcgctgacctcgccttagaattctcaggtaccccttacttcacacaattattggtattatataccattgtattgatatcatatactaataatatttaaataataataattgaatagatgtgtttgacactaagaagaagaagactatgagtaggccatttggagtggctttgttggtgggtggtattgatgtcgaaggcccagttatctggtgtgttgatccttctgggaccatcattaagtataaagctgcagctattggctcagctcaagaaggagcagagtccatcctcttacaaaaatatgatgaaaatatggaattttcaggtaacaccttcttacacatacttttacaactcataccgctattatacatacttatctacacatagttatgtatataattaaataattaattttaaatgggttagttgtgttttaaattttttatttcaaaaatttgtacgccgtactgaaatttgttagccctaattttgggaattgttcatctcctttgttttgggctaatttgtgtgttttatagtagatctaaactttatattaatttttaaagcatttttgactattataatttctgtttggtcaagtaatgttcagatgcggaggtccttgtacttgagattctacgacaggttatggaggaaaaaatgagcccaaagaatgtggagatggccagaatcagagtagatgatgttaaatacagagaatatgacgaagaggcacttgaaaagcttatttcaagcctgccggagctgccagaaaacctaggtgcagagtagacgcaaattctccgagacacatttttgataaaaaataatctttcctgttttttgatttctatttattttttatttatcgaaaccaacttcaagtgtttccccctagatctatgactaatttttacatgcccttttaactatacggtatactgtataattgtaaatgatgtgcatagtatgcagtataaataaaagagttttatatttctaaagtttgctcgagttaaattatgtgttataagtgttcaaggcgtagaatcgaatctcagagcagtatggagtctagtagtttaaaaagtagcaaggttaccaaagatacctcgcctactaaatccaaaccaacagaaaaggataaaaccaaatctaaggaaaaatcctcatccaaagacaaagataagtctaaaactaaggagaaaccttcaaaagaaaaggaaaaggaggagccaaaattgaaagaaaaatccccgccaaaggacaagtcggtaaaaagtaagtcgaaaattgtggatttgcccttaccaaagctgaagaaaccttctggaaaagttaataatcatgatgaagttccaatttcaggcataaaaggagctgcaaagaagagttggtgggagatggacggatgtgtagcagatgtgtatgccaaagtggtcgatgcccaaaccccaattgattccaaacctgaactgaaagaagacaaatccagtaagaaaactgcaagcagtgtccaaagttacagtgaaaatggaacctgtgaaaatggaacctgtgaaaatggaagcggtgaaagtgtaagcaaggttagttcatctagagaacgtgagaaatcgagccctgctaatgttgaaaaagatgaagagatccagaaaagaggtcggactcttagaggaataaacacaagaaatcaagatttaaacgaaactacagcaaccaacgtttcctacagaacagcaaattcaaacttgagttccatttcaaatgaagagaattctgaaccagttgccaaacctccacctttccaatttaagggtgcagttgtcagaggtggagcattgaacatttcaggatttggctcaggatttaaagacgataagcctatgccagagagtatattccaaaaccgaaatattccaaatcgacaaaatcaagagcaagatgattacgaggaagactacgaagcaccacagagaagtagtaatcctccaagaggacctgtaagcaggccatccgcacctagatttggcgcaagatgtgaagataatgatggctttcagtcaaattcacttccctcaagaccaacaaacgtcccatcaggagggcctgtgggatcaggcccgggtttatcaccaagacccaagtttacaagacctatgccacttaaaagaggagctggtgcaatatatgcaagacccgttagttttactccattcacttattatccacaattatttatctactaattatcttttgtttattattattagtattactatcgaatcacagtatataatatggttataggctgctgtaataaaaacaccagaagaaataattaaagccctgttagagaaaatatctaatctggaggaaaacaagtacaatgaacacacgaagctccagaaggagttaatcgaagcgattttaaagaacccacacgttttgggaacttttgactctaatctgattgtaaaaacagctagaaaaatctgtgatgtcgcgggaacaaacagaactaatctttccaggagttcattgatttgtcttgctcatatgttcgaactaataccccaagctttgacccctttaatcacggaggcaataggtttgtgcgccaaaaaaggtgtatcaagttcacctgaacatctcattgttgcctctaacttttgcctggccaaaatttgtttatattctaatgaattcaaagtttctcaacagcttgtctccgtttatcgaaagtatttcattactcactaataatactcagttatcactaataatactttgttatcccgggtttacagtaatatatttagttagatatatatactgctggttgtagtaatgtacctagtatactcatgctattataccctatcactacctctaatatgtatttatatgtattgtttagtaataaatcatatcaaataatggcattgaatgcgttggtggttttgatggacagattgggcccgaatatcttaaagcttaaaaatttggatggaatcgttgacgtttcagtaaaggggataacaggtggcggagttcccactaggactgctgggagaaatattcttggcatgatcaaagaacatgccaaacttgaccattatctaaacatgtgtaaagctactgaaattgctaaaaagacagtacaaactgcacttctcaaatacgatgaagattctaaaatttgctttgtagaagagtattgtaaggaaataacactttaaaactcaatctacttttaatatataaaattattcaatacaaatattaaatcacaggttaattataaagtattaaatcttaattggattataatcaattgatgttaaaatatgtctataaatattcattgttattgaatcccatttctccttagatttcccgtaataatagacatctctagttcctgaaattaaataaaatggcccgaatacatcctcatcaaacttaagtaataaatattcgaccttttcaaaccttaaaagttgttttggaaccaaatttactggtaaattatcaattttcaatggagtacaacttattttcctggactctaaaagtgaatttaacaggtttttatcaaacttcccaatgtaatacaatagtgcatttaacaattcattctttttaaactcggggatcatcttaaagatacatgaaacttcaggtaaatactgggataatctaggtccagatccactaacgcatgatgggaagactatagaatataataaatattctagattatcatcagatatgaaaaaacgtgatattttatgtaaacttctaaaggtttctgaggtagagattttccaagaactgtcttgtaaattcttaatatcgaataaagacttaaaaattgaaagtaaaccaggtccaggactaatatcccgataaaataagatagaaagtattcgaagtgagaaagagtaatccagaaccctttcatggtccagtagtttttgaagacattggtcataaacaatgttaaaatgatcattttcaacagtgtgtaagttaaacaaaacgtcaattaatgagtcgatagggaaattatcatgatccttcatttttttgagaatttgtaaaaataaatcttcatcttcaactcccaattcaactacatttttactaattgaagataaatatttaggtacaacttcatttgcatttagaaatagtttaaaaaattctattgattttgcgagtaaacttccaaaatcttcttggtcctcaattaagtcaggttcaactacattagaattagttttgaaaaggttcaatgctgaaaataacagatcccattgataatcctcagttaatgaattcaacatttgaggtagtaatttaggaaatgatctagaaccacatttataacagttgttgtataacaacaggatatcaaccttgtcacttaattgtaaattaccagcatcagcatctgagatgttatgaagagtgggaataagttgagagtcaaaaaaatcctcaatacctctaggcttgaagtgtgaaagacattttgaaattaatgtgattgagctaagtttatactgtggtaataaactttgaattctaaagtacaagttcatgaaaactgattcattgtaccagtcaagcctgtaaatgtaatttagtgtagataaaatcccatcaggtttcatatccctcaagtagtattctaacttatctgagactatatttaaaattgtttcgttagttatgttgtggattgcaatggacttgagaagatactggaggtcaagactattcatgtccagcagtaaccctttattctgaattattaaccgttctattgaatcactatttacatatttagactctgaaagtgttaaaagaatgttaaaaaacgatctagaagtgattttcaagctgtttgaactaattctggacaaaatagtgttacaaaaagattcatttaacctattcatcatgtgtaaatatttagaaataattgccaactgcttcgtgttcatgtaacataagaggtctgaaaccttattaatatacacatctgctatatctcgtatggttaaagggccaagattctccttagtttctgggtccttgtacgttatcttcaaattggatagataggtggtggaatttgccttaaatagggagtagtacaaaaggcaaatgtcctttatgctgtgcttttcatttgatttcctgtgaattccagttaaaatattacgccattttaaggaatcaaaatcttcttgcctggcaagacggtataatgacataaacacattaggaacccttttagtctgcattttgtactatagaatagtgtaatactaaggttttatagaaaaataatgttttgataaaaaatagagaattattgagtgtatgaaaatatattacacatttctgaataaataaaaagaattagaaaactaatttggtatattaaaaaaatattataaatcaatttttaatataatttaaaacaatttagaaggttaaaaaactctcaaattatttcacgtcattggattccaccactaattttataaattttttaacaaatcattaaatatgaagttaaatcatttgtttaactaaaattaaaagaatttttggcattaattccccaaatttttaataattaatagaattaatgagatgaacacattttgaatcatcgaaccaaatttattaaataattccaatatataatataaattcatgtatataattaactgtaatatatataactaaattaataaagtgtgtaaaaatgtgtaaatataatgaataaaataacgcttgcaaagtttatatttactggtagtaaagtaagtgacgagcgtgaggatatttatgatattctaaaatcagttgatggcagtggaaatgtacagtataaagtacaggaattacaccaatgtcatccatctgttgactttcatgatctggaaattcccattagtgacatagataatgaagaatttgagtctcaaaccaccaatagcacagtggataacatctctgtggttacaaatcaccactttcctgagagtggagagtataattcacaagttactaaagacagtggcagtgttaactttataattgaggatggacctgatgaatatcaaaggaataactgtatatttaacccaatcggttgtatgttcagcagtaaatgttttaaccttattccaacgaacacaagcgaccaaagcaatttaatttattcaagttatatgcctttaaacgaatttggctcagaattcactaataaaactgagaagttcattaagagttttgtagcaggcttgaaccttgttttgatgctatttgccatgttcttacctctatttttacatttattctgccaatttaggctgtataattatctatgggatataaaatccggtcctaaatctaacaaaatgattactaataaggaaagtggagatagtattctaaagcacttggcccagtttgaaaactttttcttttttggagttttagtttactctggaattcagctgattgggttcctaatgactcatttccaatacaaattatgccttgaaaacttgtgtctcacgtccattgaggattcaagaagtttgttggaagagttaagggatgaagcatttgagaggctgaaacagatttattccagtaacaaaatgctggaaaaatcaaattttaaaaacagtaagatgagattgattaaggattttagtgaagtgtctggccagtttaacgagtcaaagctagaatacgtctggaggaaaatgaaaggtctgaaaatcaaaatatttttccttaagatttgggctccttttgtcataaatttaattttatcggctttgctttgttttaacctctactacagaaggatgagaatgaacaagagggtgcccctaggacatgccaaaatagtctcagacttacagtggtacgctgctattgagtatgaaggattttggtggatttttgcagtgttcgcacttaacatcgcaacttggatgtgcttgtgttggattaatagaagtgacagtttcttcaaggccctgggcaatgccgaagaactaattaacaaaattgtaaaagaccttacaaaacaagtttcaaggcaaatttggaacagggaaatgatgtatattttaaacaaatcgttcagacatgaatctgaatattggcctaaatatcaaaaggtttcaagcgaaattaatataaacttaaatgaaacaaaaagttatccacatatttgtaaacacatgctcaatgaaattacttaaatcaaattttaaagttaatattttacccgaatttcaagttgctaacaaattttgtttaattaagtcttggagtaacttttcctctggaatctacaagtcgttgatatgctctgtcaaatgcattgtatcttccgtattcatacgccctttgaatacgggccaacagaggcctcatattcttggatttcccagtaaagcgggcatatttctgagaatgctcagatgccggagtctttttctgccctgaaccagcggcagttgtctgatagaaaaccctaatatgaattttactggattaaatgtagacttacacatgtttatcgagtctgggatcgtatttacgtaacgccattctaaactttgactttagaggtgatatatgtgttaaataaaaatatccagattgaacacaactattaagcttcacgggaagacgcttactattgttcctaagtaagattctagagaggaaaatcatatcaccaagttataacctacacatttaaatttttccacaaataatttaaattattacacatttatatctgtgataaagtttaaaaaaataaataaagagggaaattgaaattaatcgtgacattgaattttaaatggtggcgtttaatatatttttaaaaaataatcagtatatatattattgtataaaatgattaaatgagtttatttaaatcaagagggaattcctttgaaaaggttcccaaaacaccaaaaaaatccaaaattgaatatttttttcgcttttttttgtttattttattattctttttctttctcaagaaagtcgctttggttaacaaatctcgcttaaagttacaggacaattttcgtgtttatgagtctaaattatctacaagccgtataaaggctaaaccttttgacccagatttatactcagcaaggatcgactttgcctctgaagagtttggcaccaagattatcgcacattctaaaggtttgtcaaaggtatcaaggattttagaagatgattctggctcatatatgcttacaccttgcaatacctcagactggtttgttctgtcattccctgagagtattttgatccaggaaatatcatttttgtctttcgagtactattcttcgtcctacaagtttgttttaaattacaattttaatttttaggaacattagaatttctataaccggcacatatcccagtgggaaatggcttaccctgggtgagcttgaaactgacccttcaagaaatgagatttttgacctttctgttgtatgtaacactgataaaaatgactgttggggtaaatacttaaaagtcgaacttttagattaccataggcttgagttgaactactattgctcaataacgaagatgatggtctatgggatcacggcggtagagtatttggaaactgaaatttctgacgacagttccctttacaattcatttgcgcaaccaaatgttactggatatccatcaataacatatgaaaccactggtaatacttgtgatgatatggttggttctgttgtgaataaacaattggacaccgcagttgatactgataccgcagcggatagtgttatggttactactaaaaaggagaaagaagcagagagagaagtgtgcgaaataggtccattgcatgaatctccaatgaagaaattgtcagacttaaagtgttttgcaaagacttcagaagtactaaacccaacctttgtgtatgatataaagaacgttattttgaactcattttacaagtttctaatgagactggcactgaggaaagataaaaatttgcataataaaaagttaattcacagagtcttgaagattggaaagtttaaaaggtactgtggtacaaatttgcttttccaatttgactgtaacaggttcatcactaacctacttttggacaagtattctgtctattacgctaacattttagatcaggtgagacttccctcaagacatctctggtttgaaagtgttattttttactttttcaagaataaaaggcatgttataggtgggataatgaacgatgtgggaattaaggaggtaccaattctagtatgtacagagtctatgggcctaatttctaaattcaaatgttatttttacttcaatctgaagtcattttctactcttcttttcactcaatttactgagggttataggattcatgggttcaaacccagaactggttcactaagccacaatttgagggataaattatatttgttttatgttgacaatagaattaatataatgtcagtccctaaatttaaaggattaacaattgatgatgaaagtttagttagaagatacgactataaggttaaggataagtatatatcaaccgtgactgtgatcgataataagttgtatattaatgtgtcctcaagttactcaacttatttcccctttgatgtagattcatcaaatcaaaaacttgataaggaactaattaagtcaaacacttctttgtatagatttgattttttgtcaaagattaccaggtataaagataacctaaacaggctaaacaagtcaaagaggtatggtaaaaaggcacaatttgacgaaaaggaaaagtttaaacatcgtaacttttatcaacaagatgaaaacacaaagtcgactgattccaaaacacataaacacgtgcttttaaaattgtctgaacgtattaaatctctcgaattcctaaccaataaactttccaataaaatttatcaagttgaaaatctactcaacttctacatcaaacgacaattatattccaatcaacaggtaacaaattattatttacaacttttgacatattaatacgtggatatttgcatatgttttagggagaattggagcgtgaattgaattacgagtttgaagtgatattgaaggtattggatataaggagatataaattagttgtaagagatgttaagagttttaagaattcattaagaaaaggtgaatattactataaaaggataaaacgatataattgttatgaaacgggttatttgtacattaaaaatagagatcttttacgattgaaaaaaaatctgtgtaaattaacaaattgtacttctgacaggaagtcatttaaaagatacttgttcctatgtaaattaagtaaattttataaactctttaataagccaaaacttacaaaatccattgcaaattatggttgtatgtgtactcagccgcttggtcattctttcaataacatatcaatggaccaaggtgacgactggttatatatggacaattatgacaagtatagcgattttttattgattttgaataattttatttccctttttagggataaattttctggttattttaatttctatttcctgtttctactgtacatttgcacacaaatcttttggatctgtaaattcaattcacacgataaaaaaatcaaaaaattactcaatttaaaaaaatcttaatctaacttattaatataatatatatttagtggttatatatagttatatttctgttgtcacgagttaacactttccccaacacatgtcactgcctttaataaccataataagattgatatagaatatatagtatagtaaaatgtccaataatatagtttagtggtgagattagcccatttgttctaatttatactcatactatatacatatacatattatatagtatatagtatatagtatacatagtatattatatattatactagtgtatatacatattataaaaaatgtgtataatagtatgttaggttgatttgttaatgtttaaaatgatttgttgatcatatgacaagagagttgggcatgataatattaaaagtaaagtcagattaccggccttgtcgatacgtaacctgaaaatatgaaagatattaaaagatacttgaatgtgtgaagagactgtttatagacctttttataaccataaatgacattggttgagtgatttaccagaaataaatagtgaaactcattagtttgattcatttcatccagcataacagtcaaattgacaacatcacttgagactgtatactttcctcctataacaaattatgcaattctaccaataaagataattctaccaataataataattttattgataaaaattgaggataaataaaatgtattaacctttaggtttggaaataccgttgacttttacactaatttcgtagttgacttcaaataccagttgtagatttaaggggtttagacccaagtgaagacatttgtacagtaatagtaaatattccacatttttaaaattccgattaatgatgaaaatgtccagtaaacactgaaatataattagctgtattgaagaaacctgaattattctgggtaactgatcaagaatcgatttggtatcattgttataatcaaatactggcagttttaagttaaatagtctcgcttggaagagtaaaaacgtctttgcattagggtctgaagcctcagattcagttattttacttggacaaaggttagaaagttgaacattataaacatcttcattgtgtctcagaggcactaagttaaactcagttgcgtttgatagtattctggcgatttcatagaagccaagattctccgaaaagtcaatactagaaaactcatggacagttttacagtttacgtagtactgagaggcaaaaatcccgtttagtgttgggaccaaaagtccatgttcgattattttaagttcatcctcagggtattcgagtgagacgcaccccaatttaaccaaacttgaaatcgcgttgttaactatcgcctcacaaatgtcctccaacttagtcccatccacaccactcaactttacaaaattcaatgaattattcccatcatttattacatctcctttatcctcatatactaaatatatcatattaatactttttagtggtatagtgggtatatggctaagagaatagttatatagttaagagtaaagtagtatggtaatatatctaatgatagtaaagtaattggtgtaaaaaagcacatgggttaggtgactgtgtgtaatatttgggatttgatttcagccttttgtagagaaaagtacgggagagataatcaagagcgccttttttagttgtaacagagccagtggcaatttcggaatttaggcaatcattaattttctccaagaaaaacgactctgttgggaaaggagtgaacataaaggccttgtaaaaaccaacttttctcgtctcagtgaacacataagcgtaagcctcgccatcataaatattccttccagcccttccaaccatctaaaattgattagatcaacctaataataaaatcttacctgtattatgtcagttgcagaatagtcaatataccttttaactctaccatcataaaactcagttccctactcatacattataattatagacccagacaaggttgttgataacaaaatatatacgggagtaagtaattaatactttgatgatgactatttttgcaggtaggttaactccccaagcaagtgtcgatgttgcaattaacactttaagtttaccatttaaaaacaagtcctggactagttctctatccttagtactcaaccctaaacatataataaagtatatgtactatggtatttaagattataaggagtaattataatagtggggaaaagtgtttactcgtgacaataaaaatatctggttgggtatatcactgtaatcccgtaataacagaaatatccattatgtttaaaatgtataaactagttacaacataattaatatattgttaatatacataactagtgtaaatagtatgattactaaaagaactagtataattatcaatacctgcatgatgtattcctatgccattgggaacaaaagtatttaaccattcatcatcgaagaagtaggtatcattagtatttgagaaggaaatgttataaaattgtaataatccgacgaggtcttgtgcagtcatcctggtttgtctcctggatgaaacaaatataagaacattcgaactgtgatcatgtcttattatggtatcaaaacaaggtttattcatcgaattcatcctagggcagtatgcctttatggaaaacccatcgataaataaattacatttaacaggcctaacggcaggtgaaaagttatagacatttggtatattcatccactcggcaatttcattcaaatttgacaatgaagtactcagacaaatatacctgagttcaactcctaaaaatagtataagttgtgttaaaattaacctgtagaatgattaatggtgtattgtcttgatatgatagattctataatagcgcctctggattcacctaacaagtgtagctcatcaataatgaccaggccaactttagtaacaagttttctcctcctccaatgtctagaaataccatcccacttttcaggagttgttattacaatatcatatttctccaactcatctctctcactatgcacttgaccatccaaattgttagaagatgtatccccagtaagttgaagtatatttttaaaatgcaatttcttacaccaatccttaaatctttcatgtgcaagagctttgagaggagcaatgtaaacagctattttgccaggaaacttgtcaaatagtctgaataaacctagttcagcaacaagagttttcccagatccagtgggtgcggcaaccacaaggctctcatctgtcatgaacgctttatgaaaaacctgagtttgaagaggattaaaatagggaaaattgtacacattatactgtttcaacacacttgtaggtaacggattaagtttcaggagtggagtatatttgtcggctgagttaaacccttcacctggagcttgaagctttgttgaaatttcaaaactcaatccaagccaattacttgagaatattttaacacaaaacggctcatttctgttatggataggaacaaaaaactctacaaactgaacacctttggaggtaaaactgacctgagactgtgaaagtaggcgggaactggtgcaaacccaaacataaaaagattcattagaaccattccatctcctactccagtcatttttaatctcaacagagacagtcaacttggtgatcttgtcagtaattggctgattatagagtttaacctcagggtatggaatgtacttgatgtacttggaaatagttgaggcatcttgttttgacctcacaatgtctaaaacctcttggtaactgaagtttataatatcctcaagtttaaacctattgaatctatcgaccaagttggttgaaagtagcccaaggtcttttgagggtgtgaggttgttcatgggagaagtgaaatttgagaggacattactgttaaaaatctgcctctcaagtattaaaacccagtcatgaatatgctcaactgggggaccacaaacagtttcacacattgaaatttcaaaataggccctagccagtcttggaatattttgaacaataaagttcaagtcagtaactaggcttgaggttttgataaataacttcgcaatataggcctggattaaaacactaaccttgttcttaatatggtttattccaccttttggcttatatataactaaaggtgaattcatcaagtctaacaattcgtcgtactcctcatttctatataatatcgactcaaattccctacattcactgagcttatcaagtataaattcgtggttaatcaggtcagctctactgttagcatatctatccatcattattccgtcctggtaatacaaaagaggatttattgatgatgcgaagttatgtgtggtttcatagtctacgtaatatctggctgctattcgacccaaatcagttgaagaaaaatcgcctgtttttgacgaatatctaatcagcttagacttatttaaatttttagcggcattttttattatctcatgtctgtacttgagtagtgtgtcttcatcgtcaccattaatcccgtagaacaagggatttttaaccatcctaacaaacaaatatgtatactgtagccataaaagagcatcagtgtcattgtttattgagcctattgcaatctctgcgtttaggaaattctccaaatgcacgtgtaactgggattctatgggtactctttcagtctgcattctaacgtaactgtacaaatttttatggtcagttaataaaatgcccttcccttcaacgtcaaattgaggtcttcccgcccttcccattatctgattcagctccaaattgttaatatttctatcaactccaactcctccaataaatgtgcccttgattatcactgagtgtgctggcaagttaactccccaggcaagtgtcgacgtgcacactaaaacctttactaatccacttttaaacatttcttccactaaatctctatcagatttactcaatcctataacaattgttattccacaatgttatgatactagaattaactatatagatgtgttggtataactaggtaagttaggtcacctgcgtggtgtattgatattgagtaatcggacaataatttaaggttattacgtctcattaattgagatgaaaatctcttaacttgtgccaagtctggctggaaaaggtcagacttttcacttctattaatcatttccacaattctagatgccgttgtaaacgtctcattcctcgagtgaacaaacaccatacactgtttaccactctccagagtctccacaatgtgatcaaaacatatcgttaacatattattcttataaatgtcatcatttttaattctataattgttttataacaaagtgtgtaatatacaatatagtactcatactactatacatatacataatatataccaaggtatattagtagtataataggtaaagtataaaaatacccgtagaaaatttgttgaagtggcacatgcctgtattctctgccaaagtagtaagtatgttccggagggactctcaagaaagctgcgatatcttcataatttgggagtgtggctgacattccaacaactcttctagtcacttgtgtccactcaattagtctacacacaattcatatacactattactcttgtcatactatatatacttaactataagtagtattagatgtgtaaaatttatagtaattacctgaaaaatctggctgcaatggactcaatcacaggtcctcgttcatcatttaaaagatgaatttcatcgaaaataatgaggttgactcttgtgagaaatgagtcgtcagactgagttgctgttgaaaatgagtttcttgtgactacatcacacttttcaggtgttgtgaccagaatatcaatctcctccaattcactctttggaacctgaaaatcacctgtaacttctcttaccacaaggcctgagcctgtaagagctttagagtacttttcaacaatttctgaggctaaagctttcattggtgaaatgtatataacctttccacatttcttcccctgttcaaaatactcacgatagttttgtaacaggcacaaaagtcccacatttgtctttccacaacctgttggtgcggatatcagaagattttgttgtgtattgaaggccgaattaaatactttagactgaattaagtttaacttttcaataccaacaaatgccttttgggcccattcaggtaacgttgaaataggtatcaactcatcttcgctctaaaaatagcacagttaatatactaatagtatatcatataacggtatatatagtacatagtatagaagtatagtgtgggtgtatagttaatagtatgtgtaagtttgaagtggataaaaaatacaggaacaattcggttttcagatggtggtatgatgagtttttcataaatttcattatcttctttaattaagtttagacttagttgtttaggaaaagttatggcattaagtttcttttctgacttgaaatcaaggccaattaggcaaaacaagtcctgaggtggtatttgggaaagtagaatttcaagccttttcttttgacttctaagatcttttccagttttctggataactgccctgttaagtctttcatagttggcgtcatctaacttgttataacggatttttgtacatagtttatccaacattgattgccactgcctggttaaattctgccgaaatgttataagctttgagataaagttaagattattgaagcccaaagtgtcacacaaaactgaagcaataatttcagaattgtcttcttttaataaggttagaatctgattcatgagcgaaactgatgagaggttctctgaagtctcacaaatcctcttacagtttctgaggcaccaggtaaaagtgccagcatcctcagtttcaatatacttcagttcatcttcctctgccagttcattatctttattttcttcagattttcctaaaacaaggttatttatcctttaaataacctttaaagaaaaaattatagcggagctggtacttcaggagaaagctgtcccatggaatcctcaattcgtagggacttgttatgtaatcagttacatttaccatttagtttaggttaattttacacataaatagtaaagattccaatctttagcaatttcgagagatgaactaatatgcatattatacataaaattaacagtattacgaaaattaatataacgtgtatttatatttttcttatttattaatttaatttaataaaaacaaataataaatatgtacgatttttcacagattaaaaataaagctacaaaaatgatattaaaattttaataggaaatcaactttcttaatatatattaattaaaaactgaatagaaatagaaggttttcaagtaaatgtgtgaacaactcaggtatggaatcctggttccgaccttgacggattatactcaaccgataatataaatataacataaactgataaaataaattttattattctaaatttagtaattttactcaagaatttgaataatttaataatttttttcctaaaggaagctacacacgaatatcagttttaaaagtggaaaaatgggaggaattaatatgtttatttagtttaatctcacacattaattattttttaaatagaaattcaaatattgaccattttattgagttaaatgagtaaaacaaaaaatgatgataagaatctcaaatctataaatcaagaaaatgcactttaattatagatattttatatttattgaattcaatcatggtttagggcaattttaaattagttttaaaaagtttctccttccctcagtcagagtaaactgtttttgttgtgcgaatcataaataattatacttaaataatgaattaaagattcttaaaatgacagagtttgattctaattatggatcttttttgtttttaaatttcataaaatttccatgttattctgcttccaaacactagtgaatctaatttcagtattcttttttattattcttagatttttttaaaatttcttgatatagttaaaatacatatcatggaaggtgatgacatgtcaaaaatccctaacgctgatgctgttgaggttaaactctcaaatttgagtatgttttaatcaactgctcaaattttaaaatgttcttaggtgacgattctgattctgttaaggggagtcatctccccgtggctagggtgaaaaagataatgaaggaaactgaacaccagggtgtaagttcaaaattctaatctctgacatcagatgatatcttctgatgctcccgtgatactagccaaggcctgtgaaatgttaataagggacctgactttgcaatcttggaactgcactcaattgactaaaaggtgtacactacaggttagtttaccttttctttattaaactctagcgacaagatataaaaactgcgatttttagcagtaccatttacaattttctatatgacttactaacaccggaagatctcaaacccatgatggaaactcaaaatgacctatcagtattttaaacattcctattcattttttataaatagaaattcctctactcactcagcattttaactgtttaatattagtttagaataattatttaaattcccgtcaaaatcaaaattttttaaataattctcacaatttacttaattcaagtcttgttttaaagccttgtgggtttaaggggccttaccccaaagatggttactctcaactaaggagcaagattacacatccttatcctgatatccggcaaggatacagcttgattcagaacaataaactgaacgaagggtattcaaatggtaatacttctaacaatttttttgatcaaaatttcaatttcgacattcaagacctaagttactcctcaattccacagtacggatccagtccaaacttcatttctggccagaaattatacccaaattcatttaacgaacctaagatgaacactcagtgacactttaatcacacttacaattgaaactaacagaaattactaaatcataaatgtttaaccaaaacactacattttatatagaatacagttaatgaatattaaggtttaaagtattaaatttaagtagagtagtaacccatttcctaaattaacatgaaacgatacaatagggtgatagtataaatctgagtggaataatacttgatagcgtttttcaacgtttttgtgtaatgtattttcgtatccaggggcgtcaacgaagtatctaggaaggctgaatatgaaagggaaccttccatagtgtttttgtcgtttttgacgaaatgctaaggttcttttaactcaataaaaaattaccatattcattatcttgcgtaaaatcgtgttcattatcaactagagaagcagtaaatttttgagagaaattcctaaaataactataacaaatattacatacctcaaggtatgattgaaaaatggaatagaatgagaatgaagcatgtgtctatcaggcatttgataacgaagatgcctaatcctcccactaaattaagataattaaagaataattaacaaacgtaacgtctgggtttcccatgaggtggtggaagcaaacaacgagtgtaacaccaatggttgcgtaactcaagaagtagtatacatattgagtgggatcattgaaccaaaggcgataagagcggtggaaaaagaaatcttggagccttttatcggtgaaactattggtcaaatttttacaaacttgtcgtaagtgatgtacatccctgaaaaaaaccatgggcacctacaattaaaatttccaatttaaaaataacatgtgaattgattaccaaaaggtcttgtaaaacagggaaaagatatctaatgatttctagaaaaacagtgtaaacaatatgtggtgtaacattttatcacatttacacctttcattgattttaaactaggaatcctcaatactttttgattaaacaagaaatataataatgtaaatataccttacttctggatagttatcccctttcaatattcaataaaaaattacaaaatctcatttgaaaacactatttaatgttataatttcatttatgaactttatttttatttattatatacaatatatttatattttaagttatattcactttctttatcatttcattcatagatatttataatatggtttgatcctgatttaattttaacatgtgtttgtcaatttggcacatttttcaagaaaaacacttttttttacttatttaatctaattttctctctattaacacgtattctacagcaccttccaggaagtttatacattttggaaatgtgtaactttttttcaaaatatttacaaattctttgatttacttttggattctcaatccataaattattgtttttattgagaaaaaccaattatttgtaattttatttacaattaaactattttttgaggattttagtcttgaatttaaatgtgcctcaaatatactgattatctttccttttgggcatcttttccttaaaatgtctaggttctcagcccttttgattcaaagattatcgcaaagtaatataaaagtgaatgagaactgtacatactggcgaccaatactactatgtttatccaattgtgaaaatggcttggatacaagcccgtcaaaagttgagagttgttttgaaggaagggccttaaaccaatattttatccaaaaaaggatagcggaaacttccaactccacattgtggaggtgttttgatatcatcgaaaatcagtttttttgcattaaaatatactatatcacagcctgcagaaaggaaagatcagtcaggtttttcagagatgacactgaagttataacaatgcttgacaaggttatagatgaaattatataccactcctcactacagtcatgctcaggtgtatctaaagttaaagaaatcatagttgatttagagggtgatatgatttttttcatcatgtcatatcaccactaccagctaatgtactatgattacttttcaaatacttatcgtgtaccatattcagataattcaggaaacaaatacctttataaagaggagttcgctaagttgattatgagacaactagtccatactattcagtatttccatgaaaacggggtaatccacaaggatatcaaacctgataatttactattgccagatgttgactcgacaatgtttgaaccaattggatctcctgaagaaaattattccacttctacttttactgatgaattagtagcttgtgacccctcaaagtttaacattgatgaaatgtttgaacaactaggaggattgaactgcagcgagattctcacctacagaatcgatgaaattgctgatgttatccctagagatatagtttcacacgggttcccttatagttattcagatcagtttgactttttttacatgatgtgggatgattgtgacactctggttgatttaaattatttgaaaaataggaagggtgaattcaatgttggaaaaaattcatggctatttgcctcagagctttctaaaaaatcacaactccactcaagaaacctgttaaattactttattgaggaacccacgaatttaaattacaagattaatcgcaactttatctgtaacgaaattgaaaacagctctaaagttccacttcatagtgatcaagagaagaatattgtgattgttagtgattttggagttgctagtctggctgaagaggagtctggaaatttggttattttcgactctgaaggaaccacatctttcaccagccctgagagtctcaggtatgttgaaggctcaattcctgcttctgaaagggacgtttttgcactaggcgttaccctttactgtatgatatatggcaaattaccctactttgggaacaacggtatagaaatgttaataaatattctcgaaaccacactagtatttcactcatttcgtgaagtatctcaagatctcaaattactgttaagtcatatgttacacaaagaacatgataaaaggattaaactaaaagatattttatctcatccatggttaaattcttaatatactatcctaaacatactagactatttatggtgtatatgtatgtgtatatacaaaagtgtatattatatagtatagtattaggtacagtaccatagtatatatatagtatatataatattgtgtatacattcacattgatgtaataaaattagtatttagtaatatgttacatgattttgtttttaaaatccttaaactctagttttggagaatgctcaaattcaggtccaggttgtcttgagaacttttcaaccttggtcgcgggaggttttgacaacattgatacgatggttagaacattattgatatccttgtagccagcggtagcagaaagagcatcaactaatagaattccagtttcttcaaaggagtgtcggcgattctcaagccaaatattctttacatttttcctaatttttctagccaaatcaaccctttcttcccacggaatagattccaaatcttcaggtaatccattagtatcattatacagttttgttggatcaacacctctattctcaatctcttgcttcaaagtagggctcaggtaatttttgagaggtaaaatctgtttggcaacttgtttgtacaaacgagacggagcatttagaacctttctagaaattaaatccttcaaaatgtcccaaagaaccatatcttcagggagaagttctacttcagatctaacacgcttgagtatcattcgagcccttttcaaagacatggtcttacgacccgactcgagatgccttttaactaaccctgaaatatagggtacttgaactagggtatccatagcagatttgagtgaagtaggaagctgcgactgcttgtatagtttggcagcaagtcttaacttttcatcagataaacgttcttctttgagttttgaaataaaggaccttgcccccctagatgtgaagctaagattcagacaaaaattggtcaataattccctctcagacttataaccagcagcaaacgcaacgtttttgacaatttgcaaagcgtactcaggatgtaaagaagctgccacgcaaactaatttggatctgttctttttggagagacgactgaagaccccaggatccacgagcttcgaaggtgaccacaatccttctgaatcagactcagaatagaataattggtctgaatacggatatcccatggcctcaaatgaatttcgaatcgggtaggtctgattaagaggatcgttcttgttatctccaaattcaatttggttacaaggcatactacatgcaattgacatgtagtcttgtttcaacaaatcagtcaaatatctagtcttgatttcacttggtatgccaagtctaatatacctaagcagaaacaacatcgtatatcttaatagtttagctcctatcaaggtataaacttcaaatttgattctcctcagacatagtattcctggttttgtttcttttcccttttcatcatctatgggattatttatcaatatatataagaataaacggtagtatataatatgtaaatgcataaatgtaggataccattggggtccaagatatttattccgaacttgccagttatagctccaatttcacggaataagatacgtggacttatcctcatgtgaaatgccaaccttttataaatgtcaacaaatctctcagaagctaaagtccttaattataagataaacgtaccgtagttgtggagtaaatatgcgtgaatatagttgttgtatcggctattagtctttttttccggttctgatacgaatctactttgcaaaaatctattatccattttcattgatgaaagaattttagtggcctaaagagttttgttgaaggaaatacaaaccttatcgtctgaagaatcattttttggccataaccactcatacaaatcttgcccgaaatcacccaaatcaaccccaaaattttccagtaactgattttttttaacattttcctgagttttaggttcttcttccttacctttaaccctcctcttggacgttttttttgttaaactgcccctaggagttgtaggagatatttttgatttacttcttcgggacctattagtgaaggattgaaccttcctggaagaaaccatttcaataaggaaatttccatgggttttattatttgatgtgtcaaatgtcacaaaggttccatggtcttttgtaaatttatatgcgagtgtaatttgaattaggtttggaaagaaaaatgatagaaaaaggttaaaaaaaatatttgtaaggaaaataatatgatacaagtacatagaacattattataatatacaatacaagagtaaaaatattagaatttcatcaaataaacaacacacaaagtgatataaagtttgaagtgtatatttattcaacggaatgaataaaagagtaaaatattgtattttaaaaaatataaaaaaataactaaaaatttaaaataacaataaataaattatagaatgaaatttatgatgattataactattattaggattcctaaccaaatttatgtataacgagtggtaaaataaaagttaaagaagcacatatgattttttaaaacagaaatgtgtaaagttataataaaagttgataaagcatataaaaatatgtgttacgtattttagatatatgtaaattttaatgattaaaagttacaatatataagtttactaggtagttaagaattaaaaattttaatttagtttcatttgatgaattaattaaaaatttaatttaagcatctaatttaaaacgaattcaacgttccccatagataaaaatcaatgattattaaattaaataggagttaacatttccatacccatattttttaattttccacaaatcacatagtaatgttttctaggaataaaagtgtaaattctcctaaggatttacaattttgggaatcatacgacgattacacattagataatccacatgcaggggtatttatttcaatatttgttaattttaacacataggatccacggtgtcttcaagcgaataatttcaactattgtaaactacgatataccttgtactgtagatgttgtcgtgagttaggtgaagacgatccacgctgcaagtaattattttcaaaatttaacatcaataattaggtaccaatattatagaacagaactatcttgcactcaagactttctagacttggttaacaaacacagggaagaaggtacaatcaatattttttaatgatttattaggaacctgctcaatggatattttacccagcaggcaacttcacaatatgagacattaatcttattaagttcccaaacatgtctaaatacagaatcagtttatttgaaaattgctattggtattaatctgttttgtaattgatattaggaatacaccaagtccagaaaccgaggaagagattttatcacatttttcgaggtatcttattaggccaaacttattaaatagggtcatatctgagttaaatgaatcgtctgttaaaaaacaaatattgtttggtgtaaacgatataacaaaggccatagagaatgatgttcccatttcattggtcattctctttagaccaaacgtgtaatttattaacttaattattttatttaggcctacaactataattcgacacattcccttaatatgtcgaacaaaaaagattgattacttgggctttttaaaaaacacgaagatttcatgtttacacttcaaaaatataagttgtctagcaattaaacatggagaatgtgaaagaatcaattcaattgttgaattagcattaaagattaaattttaactaaaaaaaattaatttcgttttattacacatatataagatttatgcttcagattttttttaaaaaaaaataaaaaaattaaaaatttaaaacctaatgtaaaaattaataaataatatataaaattaataaaaatattaaataaacaatgatgaaattttatatataaaaaaataatataataaaataaaaaataaaaataaataaaaaaaatatataaaaaattaaagatatatttattaaaaatatatataaaataatatatattatattagaatttaaaatgaactattaatatatatattagaataaaaaagtatttgaatatataattaaaaaataataaaaaaattatataaatatatatattaaatgatgaatattttataaaataaaaattattaattaatatatatatttaaaaaaaataaaattaaaaaatatattaaatatataaaaaattaaaatataattagaaaatatattattatttattattttagtattaataaataaaaattaaaaatattgaaatcaaataaaaagtgttaaatatttttttaattaaaaaaataaatattaaaatacattaacaaatcaataaaataagataattattaatatatatatatatatatataaattaaaattaaaaaattataataataaatgtaatatatatataattaatatacaataatataataattaatataaataatattggatattaattaatagataaactaaagaaaattatatgttaaaatgaaaatatgttataagataaaaaataaaattaaaaaaaaatatataaaaatttgaaatttatatatataataatgaatataattttaatattagaaacaaattattaatgtatatatatatataaattgaaattatgaataaaaaaatagaattaataaataataattgaataaataaaattaaaataaaacgaacatatattcaaatatataaaaaaatatgaatgaatgaatagataataattattatatattaaaataaaatgaaataataatgatatcaaatagataatatattatgttaatatagataaatataaaatgataatatataatataaataatatatatatattgaaatttaattataaaataatatattgatgaaaaataatattaatataagtaataattaattaaataaacaatatattataaataaaaataaataaataaaaaattttaaatattataataattaaattaaaaacaatttattataatataaaataaatataaattaattttaaattgtattatatatataatagtaattaatttgattatataatatcaaattgtatataaaattaaaaaaatatatgaatacaaaaaaatacatttataaatatcaatttaattaaaataatataaaaattaaatatatatatatatgtatttaaatatttttgtaaattataataaaattaataattcaaacaattaaaaatatattgtttaatagagtttatgttaataaaatgcaaaacaaaaaataaatatataaaattttatagaatttatacaattaataataaaaaaacaataattttcaaattttatttatatataataataatctataataaaatgaaataaaattattatttataatatttattgatttgtgttatatatatattatgataatttgttatttatttatatatatttatttttaaaagtaaataaataattgttttatttgatatataaaattgaaattttgaaaattgttaaatattattattatatatatatataaatatattaaattatttaatatctatatattattaaataaatatttaaacaaatatatttttaaaattataataagttattaatatatatattatagaatataatattaatttatattttaattttataaatatttaatcaactacgattaaatatataatattttaatgtttttataaattaattaataattacaatatttttcaaatataatttatatttatattataaaatgttttttctattaaattttaatatttatttattttattaatattattataatgtaaatatcataatatttgatctgaataaaattatttaaaattttattaattttattatttattatataattatattttttaattataatatacacaattcaatatttttttaaaaaaataatacattttaatatacatataatgatattatttttatatatttaacaatgattttatttttaatttcctttatttatttatatattatttaattaacaaaacattataaaatatattatatgcatttttatttttattaacattttaattattataaatataaaattgtttttatttattcttactaaaattacatatattaatatatatttaatttacatttttttaatttttaatttattattattattttactaaatatttacaattatatttattatttttatatatattatttatgtaaatataaaattatgataatatatatttgaatatttgtttttttattttattttaatttatttaatattcatttattaatttaatttttttgtttataatttcaatatttttatttaaatatatataatactaatccgtttaattttaaaatattatacaatattatatatataaatttcaatttttatatatatatatatttttaattttattttttattttataacatattttattttaatatataataatttttagtttatcgattaattaatatccaatactacctatattaattattatattattctatattaattctatatttattatatttattattataattttttaatcataattttttatatatacatttaataattaatttttattttttatatatatacatttttttataatttttaatactaaaataatatatataaatatatattttatttccaattataattttaattatatatatatatataaattttatttttatttttattttttaatttttttatatacataattaaatttttatttttagaattaatttttaattttttacctattagttactaattctgattattttaaaaaatttttattttttattttgacctttggtttataggccaaaactagccttataaatttttattaaaaatttcactaaatcttagtctaaaaatttaaataattagttatttagcattgttattgatttgtctttaatatattaaaattttataaaaagctttaatcgtttcaataaaaaaaattttttttacagatactcactctccagtcctgacatttttatacttagttaagtaactctaaatttttatattttttactgaatagtctatagaagtaattataagatggataatgataattttaatggttatttacaattgaataatgtcaatttttatgtttttcaacaaattgtctagatctctcgaaatctcaaatataattagatataattttaattatttaatttaattactataaaactttcttaattttacaattgttataaaaaaataattaagttaatgatttttattttacacactatgttggacgaattggattaaccaacatttatgtccactaatagtaaatttatttaagattgaacaattttaaaaactagttatatatttttagtattacacagtaattagcatagtataattaatatactacattaaaattatgtttgacggactctagtcaagtgctgataatagatcccttctaagatcacgagtgaatatcatcataatatttttgaatccattttgaagtgctttatcaaaccagaatccaaatgctcttttatttgacaatcctgttgttggccaatatgctctataatgctttttgaactcatttatatagccttcggccagaaaaatcagtagtatcatagacaaattggtgagaaagccgtttacagtggaacctgtggaattccagtttggtcctacaccagcatatcccacagcaagaagtatcatatgacttacataaaacaaaatagtcaagaaaccaaccataccaggtttatttacaatagctaaagatgctcctgaatagggatagtgcaatgcctttataaataaaataccacaaagacccattactggaataaatatcagagttccgtgccaatacgccttttcatcttcccatttgtttttgggtgagtatttttttgtttcctcgttgacatcaagaattgctatagtgatgtatggaataggagcaataataagaagtgcttgatcgatcttagttacattcctaaagtcaactagcatacccggagctatagctggataaaaaacgtacacaacaccctgagcaaacacacacattaccattgcagatattgcatgaccgctaatactatcgctagtctgattagaagaaccaccaccattagaatggtcatttccttcatttttatctttattcttttcaccgcatttgttactattgttagtgccattatagtaaacaacagtccaaacggcagcagtagcccctgtaattattattgataaaaacaactcccaggcaataatgagaaaatcagtatcgtacctcctcttattaccaaatagcttcaaaaatataaactgataaactgatgtaaatataccagagacttgaatggtggctaaaaaataaactatatcatcaccgcccaatttaaaactaaaaggaatattcattccatacacaaaggctgaaaatgccaaagcccagtaaaaatcagttaaatgcccctcttcaccaccagttacatacacagaaaatagaactacatttataaggaagaataaccaattatttgcgattgatacattttcacactcttgagttccaaaaccttcagatgctgagtaaattgtaccaaaagtatttccaacaaacccaccaagttctattgcattgtgaactctactaacatagagactgaataaatgttcgggtattctaaaccgtttcatacagaatatggctccattcattccaaccctaagtgttagaagtagtgaaaatccaaccaaagcataagctactttcttagtagtaccattcgacccatcactttcagtcataacattcatatagtgttcatacctacatcccagttatattttaataccaattactaaagagtttaacaataccattagttgactacagtagttatcattcacattcagttgggtattggtatgttgttagtagcatactaccatgttatgttatattcatcttattaagctcagtttaggttattcgtttataattttaaatatactattgtgatacttggttcatttagatatattaaacatacaactcatactttatgcaatgccaccattattataccctatatactaaatgtgagttaacaactatcccacatgctacttttgcgtcaaacatacttagaattttcttcattaaatattacatttcacaatataccgattcataaatacgtaaaatacttagtagtggtaaactccgttagatgtatagatgtatagttaagagtaagatattatttgagtgtcgaatatatgataaaaaattatccatttttatccatttgttcgaggtcaggtataataacctgagccagttgattgtagacatcttcctccagaggtttcatttgtattaatctattttcatattttctatttgacatattctgtacacaggagagtagtgattcttcatcttcaaattctatcaacatgtctccagcttggaagtccctagccatttcattgtgtcttggagcgatgattagtgcactcttgatttttccgtgttttccaaactcctctttcacatcatccagtacatccaaatattcaacttcagcttcaacagtttcgggaagaacaatttgaacaagatgcaaataacgtccactgaaattggcaggaagggtggttggtgcagatgaaagttgtggaattacaatctgttgttgtgtggctgtcttcatggaagttgatgaataatcgttaggacgggaaacacgcaattgaacacccatacaggtcatcccatccatggttaaagccctttcagtttcctcaacacttgcaaattcaacaaatccatagttccccttgtccttcgcaaaccatacgtacaacactggtgaaacatttggatcgttacaaaaattgcgatttctcatttcgttccaaatcaagttctgaaacccagtttcagttaatcctgtatgaactggaagatttccaaagtataatcttctaagtttcctggtagagttcattagggcgggatctccacccaatatagtagtttgttcagtctttgcaacccactgaaaaccgtcccaaaacaaacgaactgtctgatgaccttcctgatcagccaacttctgaaatccacctgctctcctaatacattcagcttgagcctttctacggcgtctctcagcagcccttgatctagcgtgactctcagatatatctctgttcaaaaggagattttcttcctcagcattttctgttctgtcagcgtctctattatagtcatcatatctctcatatctatctctatatctatctctatatctatctctacttctacttctacttcgatatctatccctgctacggctcctacttctcctatgtctgtacctttcatagtcgcctctgtaaccatgatttctgggataggaacgacgtctactatgcctgtgataatctcttcttccgtctctatagtcatctctataatctctgtgataagcgtgttcattctcgttatttcctacgtatgaaccttcggggttgacaggataggccacattatcttgtctgtaataataagaagacatttttattaaaattctagaaatttattgtttagaaccaaaaaaatgttttataaaactttattcaataactcactacccccaccaataactatatgataatttatgttaattataacattattcttgattctacccgacacattaataaataaattaattttttaattatccgagttgattttttatatcaaaattaactttttagattattttctacaaatacacttgagattccactagcttcccctttacaatcattcataattgattaattatatacaaaaacatgaacatattatcttaagaatcgataaatggaggtatatattccttatctgctatcgtattttcagaaactatagtctcagacttgattattgaatttttaacctaaataatacttgaatagaaataagtagtacatttgaattttctttcaacgttacagatgttccaagtatagatttatttaccacactattatcctcaattgtacaattatccataacaacggagtccgcaatcttaaccttatcactgatttttacattatttcctgattaaacgcttaaattctaatttaactcacctattaccgagttctttatttcagctgattctgaaacctctgacgaattgccaagtaaaacattcttaatctagaaagtatacaagggtaaaaaagtactttaggagttttttttgcgattttctctttactagttagcgaacacttaatatttgctgagtatagcgagtctatactgttaactctcgaacagttgaacgattcacctgaggctataaaatagaaagtccttgtacgttcaagaaactcgtcaaaaaccacatcacttaacttccatgatttgtcactacaattttctagttcatgttgtaatgactcgaaattatcattttttagatactctacggtgtgttgaacaattgtatatatggtatacctctaagaattggagtttgttgaagtttaacaatgtagggaataaggtccaactaaagacaaaataagttaataaacatacccttatgctggaatttagcagaaaatcacatcttagaactttgaatatattaattgaaaatgaataaacgtgaatatcaacaagatcaaaagttataagagagtttgcgtgattaaccaggtggtatctaaataactgaaagctctcaccactttccactgagagatgcggggcaattgacagaagagaacaagtacttttgtccagagctgtaacaactctatatttaaaactccaatcttcaaagtcatttccacctaaacaaacctcctttttagcctttgcagatcccaaggagtttatatcaagtaaggctactgtacacaatcttgggctcttaagatggtccaacaaaaaagatttaaaatcaaagttaccaaataaatcacagggcagaaccacaaaatcgttttttatatgttcagaaatgtaatttaaggagtcagttgatccaaatgaagaatcatcggaagtaggcactcccataacactaactttgggcaatttctcagaaccaaactcatctctcaaaaagtttaaactaacccttaagttttcatccaccaatgaggaaatattttcacttgttagaattatgatttctggaaaatgtttaataaatttctaacaaacataactatatatagataatagtaaaaataatgtgcataaacaaacaaaatacgaaatgaatttctaacctttaaactgatttattatcaaatttcgaacagtgtggtaaagtagagtattagagccaactttaagcaagatttttgggagactctgagtcaaggaaataaagttgttagaagatcctcccgaaagaacaactgcagttacatcatacggaagactgcattcactggatgatttatctcccatatttataaaacaaggagcaatttttcaattaatttaaacaatttttaaagacaatttaagttatgatttacgaaaatttttaaattgatgaaaataaagtttagaacaggaggattccaggtcaacatattaaaacaacaaacatatataatacaacatattaaaattaactaactctggatgataatgtatcaaatcatggaatccaatgaggcgcgggtcatggaatgcagcgataataaatgagtggttatttagtacacatcataacaaatatttaaaaaatagttaactatatttatttatttatgaaggatcatttactttgtcttaaatacggtccttttccaaaattttgacccaataatgataaactggattccacaaataactaaacattaaaaactttactgtagaattttaatcccaaattatttaaattatataaagactcatcaaaacctttacaaattgatatgaaataacctgaaaaatttctaaatattttactttaaaaaatcccccttcaagattcagctcttacaattagcccataaaatccctgaaacatgaaatttgaacgtcttttaaatatcagttaacaatttattagctaatcttcacttttatctattatttaaatcaaatcttttatgtaaacatctgagataccaaatctaatatttggagacgcaatcgaatccacaaaaaaaccacctttatatttaacttaaattattttatgtgttttgaaaagtctataaaataaccttaatgcttgattataaattcaatttatagccaagtatataactgattttaagactgaaattgaaagattagtcattttgaagtaaattgactttgtaaatacaaaccaattttttagttgatatttttgagattaaattcatatgactaaaatgcagaggcttgattcgttgaaagagcttttaaaacatgtgtatgatagaaatgaccctgaacaaaaacctagttccatggagggaattaaaaagcaaaaaactcctacatcattaacggtattacatttataacatatttacattgcttatttttacataatattgtattttatgtgatgaaaccataatttctttctctaggagcaagttttggtgggacttttgaacgatcttttttccacttgcgttttccgttcagttcctttaatggacgagtcacccataagtttgacaaaaaccaagccggatccaaaaaaagatcgctacatgatatatttaaaatggacaaaaccagaaatttttattcaatcgatttcccacaaatttacaactttcacaggaaaaccaacccctattcaaggtactaatactaatggtttacatttgttattatttaataagagtatagttatgtgactgatattcttaaaaaaaattcaaattttcttaggcaagatgactagatatggagaaaagagtgttatattatctatgggtctttcaacatcatttagagcatacttaaaaccatttcgttattcaaacaagatacctgtcagtatcttgaacgaatttatcgatgttgagataaacaaaggtggattgtgggcatatcaatctttacctgcttttttatcctctgaaacaaaggataccaaagaacaaactgaaaggagaaacaatcttttaaaaatagccaatgaacagcttgatgaaatccagccatcaactattgtatccattttatggtctttgtatttcatacaagatcacaaacgcatgcacaagttgtgtatgatattgtgtaatgagttcatgcagaactaccagagtgacacaagaaactttgtttatttcctttatttatgcagtaaaatggagttaattccaaatgaaaagttggaagagattgtatattccaaatttaacaacgtaactatcttagaaaatctcacggttccagacattgttatactaactaacatcacaaactttagtaaaaacactactctcacacagaaaatatctactcttttgtactatgaaatagaacacatgagtaaggaatgtgttgttttcctgatcagtggacttacaaaaatgaacttccagtttcatctaaatgatttgttttctaaaaaactcttttcaagacttttggccgtatacgacgaaattaattctgacgagcagttgagtgttatattttataccatgtctacattaacctatggagttgttggctatttaaatgaattgatatcaaagactttaactaggcttcatagactatcatcagatcaaattgtgaaaattggtctattatatgcattggctattcacacttcacagttggctgacaaacttaatgaaaagaaaacagagcctaaagaaattaaagacaggatctcaggtaaactggaaggtccagttagcacttatattgacgattgtctcgagtttgtattcagaaaagctgcagtaaactataaatgccctgaggctgatttgcttataatgatgaatggcctcttaatacacactcacattccttcatcatccaaaaaattggacgagttaggtttagaattcggtgagtcttggataactacatttagatgtactaaaagggttacaaagtacaataaaaatgtacctaaaatagatattaatgctttggaggctcaggcgaataacccagcctatagcaagtgctttaaaatgttctatcttaacttaattgacgaattttgtaacagaactgacgagtttaaaagtgaaaccgtagatcaaattgtcttttcattactaacattaaaaatcgacttatcacccatctatgaggtatttaacgataactttatttgatagtttacatagttatttttataaatacttaactatatatgttataggctgtcttaataagtaaaggtgaatcaataaggcagaatgtgggatttgttgaaatacggattgtggagtctgatactatggaagaacagtatgaaatggctagggaagtattaacatggtctagggccaaggacggtattgacgttctcaaaattggtgatactgtggtagattcaagtccatttgaaaaactcggcatgtcagttgaagttacttcccacaataatgatgaggaaattaaaggagaaccagttgatactacaaaatctgatgtattgaaagattctgaagaggatgcagtagaggactctggagaggaggaaacagaaaaagaggtaatcattataaaaaaagctgaatctgtggtcaaagataaagaaacgccgattaaaaatagagttgagtttgatgtgaaagctgaagaggaacctgtagaaattgtagaaagtgcggagcctgtagaaattgtagaaagtgcggaatctgatgaggaagatattgtgtatgttgaagaagcagatagtagcattgcaagcagtgagaaatcctgtagctccagctctgttatagaggaaatagttgttgatacaaaaaagagtaaaaataaaaataaggttaagattgaaacacctgttaaaaaagaaaaggctaaggaaaagactgtttctaaaaagaaagaagatgaagagaaacgcccggaatctgaggaaaaggtgaaagagactaatattgaggatttaataaaaatggcttcaaaaatggattcttcaactttagctcgttagtgtttataaaaattattctctaatgattataaatagttatttttaaaattaattaattaaattaaaacttgcacgaagtgggatttgaacccacgaggactctcgcccaccagaacttgagtctggcgcctttgaccgctcggccatccgtgctgaagaacccttgaaattataatctaatatttattatttagaagggagtccagtctacgaccttttaaaaaaactttataaaaaggattccgaagatgttgaggaaaagaaggtaaagaagatcgggaaatatgaattattaaatacacagagtttagaaggtaaagagtcaaagagacaaaaatctaaaggtaatcacttaacacattcaaaattaaatttttagaggcaaacaagtccaatttatataaaatttcaaagtataggcaaactagtgaggattgggtaaatcttgccgtggaatccagagaacctacaaaaaagggtataataaatattaatatacactcaattattgtttatataataatacacccttttaatattattatattatttcattagggaagaaaaaagataataaacctcatttggatgaattagcaaagaaggaagatgttttttataaattgaaaacaaacaaaaaaacgagagttgagttggaaaagagggaagtccaaattgtttacaaatatgtaaaaatcaagaactaaagctttaattttaaatttattgatcataattttaagtcaatacaaatatgatttgtattaaaaatactatgtattaatataagtatataactaatagccatcctggaaagaaatgagtgggagtaatgactggattccaagttgtcattacactcatgtaattaatataaccgtatattcaggagttattaacataatattcctccaaaaaatatatttaaaattttaattaacatatttaaataaccagtgataaccgtttcagtgataaatcccgacttctatttattcggcactcatgatggtgttggatatcaaacgttaatttatttatatctcagaatctattttaaatatttcgaattcagtctattatattatttttattttaaactattgaaagatttgcaacttacattttaatttagtaaattattacattttttgtgtttcgttttctggatactttactgaaaaactttttatataattcgacatatgggttttacatattccactcttttttttaatgcaataccctccttctgggaacctaattattactcattcagtcttttaacctcttagttttttctcccaatggttttctacacagccgttcattttagatgccgatctaaagtcgacttcggctatagagtagtagttcttggatcccacgaaaatttgggtaaatgggatgttaagaattcccacaggatgataatgagttccaccgtagatgacatatggaattcaagtttcccagcctaccttccccttaaggcttatgtagaatatcgttacgccgttttgaatgaaaatgacgaatttttgcgctggaacgacgaccttattaggcacctggaacccacaggaaatgaaatgatagtagaagatgacgatggttactatcgatctgaatcctcaagttatcccaagagccttaacacccccagacctgcaggtatctccctaattcaaacctttttataagataaatagtatggtactagtggttattggttatatatagtcaatgttactgtaatttctcaaatatatacttaatactaattatagcatcgctaatttttaatatagctcttggaacaagtgatgaaaaggttgttgatcacctgggattaaacacttttcttagtgaacctgaatacaactcagacgacatggtttactttgtgagctcaagacttccagtccagatttttaggcgtaaagatggttcttttggcctcagggacagcaacactcctctaactactatgctatgggagcttagaaagagatttagaaataagatgaaatttgtgggtgcatgctcaattaatttcgagactgaaagtgatcttaacgcttctggccataaaacagatactccacgtgatactgttgacgttacccccaacagcacagcttctgatccagttaatcaagtaaataaaaatgaacaccaagagaatgcagttaatactgtcaatgacaatagtcttgaatcacaactttgcaatattgttcatagattagattccactcaaacccgttcaaagagttctgattctgaattttccattcccctggatgaacaatttaccgagttcgaacaaactgaaatcactgaacttctactcaagcacgactgtataccggtttttatcccccagaatgaaatgaacaagtcaataaagttctgtaaaaagtacatgtggaacctgttctacaacataggcctgtgggatatcacaaagcaaaacgagtttgactgggatttatggcagtcttactgtaaggtaaataagttatacgcgtcaacagtatcccagtacttgggccgcagtgacttcgtatgggtccatgactacaagcttttgatggttccacagtttctgtcccgaaagtgcaaaactgctaatattggcgtttttatgcatgctttattcccctcctacaccctgtttgcctgtttggcagttcgggaagaaatacttagaagcatgctttgcgcagacttgatagggtttcactttttcgaatttgcaagacactttttaaccagttgtaaaagagtacttggccttgaatataacttttcaacaggtggaaccattggtatagaatacaatggcaggcaagtcatgataaggatgagtcacgctaacgtacaggcagacctgcttaggcaaagaataggccctgaaactaatgtaccagaactagctaaacaactcaaggaaaaatggccaaacaggtttatagtatcatcagtagatcgtgatgttcgtttatcagggttactactcaaattcaaagcttttagaaaattcctccagaattacccttatgccaggaataagatacttcttgttcagtacatttgtagtttggatacattatggcaaacttattcagaatcacaagttaaactttcgcatctcgctcaagaaatcaatgatgaattccaggtaacaattgcgaccagtacttagtcacttataacagtatagttaatataaatactctgaccccaacaccacccataatagttaacatagtactaacaatattatcaactatcattacttaagtaaaatataatgtagaatgtccacgtattgttgaaactgaatcccaactctgaagagaaatacgctttattcttggcttcagactgttttatggacacctgcataagaggtgggataaacattggagccttggaatacgtttatacgaggaaagataagcctgctatagcaataatcagtgagttttcagcatttagtaagactcttttgtccgcaattagaatcaacccctggcatacctacaatgtcatggaggcacttgacacggcgatgtcctcagatccagcaaccacacttgaatcctgtaaaaaagacgtatcatacattgaaaacaacgatgctgttacttgggtaaacgacttcatcaaggagttgtactattctaggaagaagcacgacatgctccacacttcttggggtttcggcaaaacctacaaaacacttagtttctcaacgaatttccagttgctggattttgataccttgattggaaagttcaaaaccagtaaaagacgcctactcttcttagattgtgaaggaactctatctagtaacccatttgacgttgaatctcattcactatatcaaactgacattcataccaaatcaactccacttccggtaattaatatttactactagtgttatagtatgattaatagtgttattaatattattaatattaataccatttaaaagtcaaatttaactatttttactgctatttttattggtattaatactagtatccacaagttatatctatatgttattcattaggcgaatctaactaatttgggagtactatcaaaggatagaaacacagtgatagtgttgataagttgccgtacgaaagaactcatggacagttggttctcgtcaattccagatgttgggttatgcgcagaaagagggtactatttcaagttaccaaccgtgcttggccgtgagtggcagactttccgtcacctgtccacaaacgcaacatctaaccacaccaatagcgcccaattagaagttgaacccgacgttccaagtgatagttggagaccagttgcactaaaactttttgaacagtatgtgcaaaggacaccaggaagttatttggagtctaaggactcatgccttgttttccaatttcaaaactcagatcaggaatttggtatacttcaggctaatgaattgaattcttcgctttggtatttttaaattttagttataacctcgggacacagttatatatattatttaattaaatatttgtaattttcctaattaattacatgttttgtttagtgaattgatgggcggattcccagtcgatgtacacagaggaaaggggtacttggagcttagattaaaaggtataaataaaggaaatgccctggtgaacgtagttcacaaatattcatcactatttggagatttcgacttcgtactctgtctaggagatgacaaaagtgacgaggaggctttcaaggcactagaaaccctaaagtcatcacatgatgcactaaaggcaactcaggagtctaatttaacctcaacaaaggaaaaagatgaagctagcagttacatctcatgcgtagtaggcaaaagacccagtaaggcaaattactacctcaatgactatatggaagtgtcagatttgctaacttctctggctaacacagttgagcttctctaaactcatttgactattttttatcattttataccacacttgaacaagttacgtttataacgatgtgaaatattttataatttagtgattttcaaaattatatgagtagttttagtaaattgataaatcggtagattttatggtgagcgcttgttaccacaggcgatctcagatctacacatcagttcacatggaagttttcagacaaagtaaatgtcataaatttcttgttttaaaaattttattgtaacaatattgatttgaggaagatttacaggatataacaactaatttttatgatggtcgagcgtcacattgtatctcctgaatattgagatcttttgcctcttttttagtatttcaactcgattttaatttaattttatttttgtgagttcctgagccttgattttggagccttttcaaacattgattcatggccaattgacagaattatcaatgacaaactgcacgagtactctcatttcaaaactcactgaaaccatcgattatatccttggaacctgcatgccaaagttacacttggaagatgaagaggtaagatatataaattagtttatttaaattatttattagagctttgaagcctcgcgtggtcccaaggatgataattacagaaaagaagagcttaagcaattggtattattttagttacttatgggattattgtaattttactataatttattataaataatagtttaagtaatgtttttgtatggtaataatccgcattaggttgtcatgtttgcatccagagcacagaactacattgactgtgtgagactttcgttagaggattccaaaagatatcagtctttttatagactagataatatgcttgaagttagtttaaactctagtaaaaatcttttagaaatttattataaagaccaacgaagttgtcgaagaaattcccatacacaatgtaccttttcttccagtttattatttttagatcaaatccgttttaaattttgatcaaattcagtctccagaatatcatgaattgacagtaccactattgttacagtagttatgtatgataaaatgtggaaaattaataaattaatagaaaagtaaattgataagcgaattgagtttaaacgagaagaatcgcctagtgttgcttgaggtaattttagggattttaagattctttagtaccttgactctagtggaaaagatggtaaattaaccatattagttgaagaagtgggaaatagcgaccccttcatcacagttgtgagaatacttaaaatgtatgcaaatgacaagaagaataataattaacgaaataatattttatagttaatacaacttttatataatagaatttatagtgagattcatttatcactgagcctgaaataatataaaccaagtcaattggtacctttctataatcctccctgtagttggacgttctagatctatttcgacattaaccttggaattattccagattctgaccatatttatgtataatttacctgcaagactacagggtaactaaagaattaatgaaacaacgaaggacaacctctctattagatacgtctagtttcactagaaagttggcatttggcatacaactaacaacgacaccgcttcttataatctttgttccatcagaagtagttggtttggggcttgagtttaaattaaatctttttgaatagggactacatttataagataatctaccgaaataatgtgtaaagtttgatcttctaaagttattgaaacataaagattccttcagaaatactaaggtaacagaattccaaaaaattaaaataaatgttaaattcatggaaacataaattcatggagcttttaaaataaaattaaatatattatgaaaatagattatgaaaggatcctggaagagtggattcaaaattgaggtttagttttattattttttaatttgatcaattttgagaaataaacaaataaaataaaaaataaataataaaatgtaaatttacaaccttaaataaagtatttcaataattagcgaagtgaaatagtaaattatagataaatgggaattgttgtgataaaataatattaaatttataattttgaataaattcggatgaaaatcaagatgattaagtaaatactgaaaaataaagtggaattcagtagaaagaatgatatataaaagcgatgaagaaaagtaacaaaataaaaaattaataatgtattaaaagtctggatttaataatatttggggttttatctaggaaggacttttgtttaaagtagaatcagcaaaactttctagttcccccaccgtggcttgtttcagtattaaaatatgttttaataaatatattattttttttgatagttgttttcctagcccttaaattatttatacaattcaatcaatcacttgttttaaaaaaggaatcttgcttatatacccaattgctgtttaccaagattctattatttaaatatacattctgggctggatcacatttatataaccaataatatgattgattttaactaaaatatttcgattttaactgatgttcgtattataactttccaaatgtttctaattggaaataaataaaatagcatatgagatcttatttatgcctgattcaataataatcgcataccaacttgtaattcgtctgtttaaatggaaatggacagaatgggaaaggtctctttaccaatacacagaaaaaggtttctaataccaacacttaagaacatcagcatacatatctatattatatgaacattgatgatacatatgtatattatcatgttgttaggaaaattggtcttactggagaaaggcaccgaatactcaatttcaaacattttgttgccctgaaggtacggattcattatttctattgatgtttaggaggaccaaatttcacctgaaaaagcgtttcaagaatattccaaatacctgttagattttctcaacaacgaaatcacactctacttcgataaatacgaggtttcagttatacctattttgagtacaacatgtcccctatatattatatattgtaatagttgtgtatgatacttatagcacttgccgtttttccttgagaaattccacccctattacctcgagaaggggttcgagttatctcgggcgtcgtttctgcacgtgagttctcagtttctatcggtatgttccctgactgtcaaatcagtttagaacttcgagtctgggaaattcaacgagttgctcctcgaaataagttacaggaggctgtacggcaaatcctcaacagaggaacacccactgccagagtcggcatacacactaaacgagtgggcgttggaagtcccagttgaataccccgtggaccaaagtgcctttaggaaactgcatcttaagactccgcttgagacttctttgctggtggatgtgccctcatcggttttcatctttcagctggtcgacgtacttaacccttactaccagaatctcccaatatactttgcagagcacgataagatcagaacagccttcatcacagtccccgaaagtgaggacctgaaccaagtatcagactttctaaactcgcagaagatcaagcttgaggacattgtgctggttttcaggccatgtaatccaattagggaaaaattacccttgttcatttgcccaccaatatgctctcatcccacaattattaatcgtgatctcaatctcactgcaaaattaatacgaaaactaggtaattcttactcgttactaatactataccatgcatatactatttctgccataatattaatattataatatattgctgctataaatatatataactaatgttgatgagcagattctgagatggggaagacagataatcatttgcctgatttgttaccagaggacttggatgttaggcttcgtctggatctacagctgttgtaccttaggaagatccacagctactgttattacggcaagtacaagacgaacaattatgtggacctttgggactcaagtggacctggctacgttagggtggatctgaccaacgacttatacgataaggaggaaggtgtgtttggacaaaccccgaggatcagattcgcaacgtttgaaacttctaaagaccaactcaaggagtttaacgagaccttcgattgggaacaagaacttaaggacagttgcacagtgtcagaacaacagctgttatggataaaggatgttgagtcctttgcgaaaaagatcctcgagacggatttggcacctccgaagtttgagctgtcagagtctgtcgaggagaagtggaagcagttttgtaacctaaacaccttgattgacgcaccagataagttcagatgtaaactctgcagtaagctcttcaacgacgccaagttcgtatggaaacacctcaaaaaggtgcacggcgagtcttataaccaggtagtggttgagtgcggggtacccaagatgcgagaactcttcttcgacgcccacagagatacgaggtcaaacccatttgaaaatttagtcaccttgccaataatacaaaagccaaagtctaactttgacaacgcaacgaaagaatttttcaaaaaggttgaaatcccacctccagataggaaaaaaagacccagagattattacgatttcgatgaaccaaaactcaaaaaggtattcattctatactattacctatgcctatagtattacctgtactattacactgtaccatactaccataccatatactatgtgatatatactatatataatatactgtcgttacacatccgtgaatggaatatatgtattgcgtaggaatttgtaacatttgcccctgatgagtattcgagaccaagtgttaaatatgacgatctttaaaataaatgcattttattcattaatttttaaatcctaatacttgctgattatgggacagtgttacacatttttcattctcaccttatttattccaccataaattgctgttttattttttttatattataaataatgtgaatgaatgcattggaatcggtatatggacgactttctgaaatagaaggcgagattctgtcggacctgagccgcctggagttaagtaccttggaacacctaaaaaataccagaaaacagctcgaaaatttaagtgttaaaaaaatagagcttgaattgggggataatttccataaaatcgagtctttcggaaacaaactcaagacggtagcagatgagagtgattgcgcattgaataaaataaaaaaagctgtaaacgtggttgaaacagtgagttcactttataattctgcctcaaaagcattagattattttaataatgatacacctgaacaggctttctcggaaattgaaaagtacattatggccgtagagtcggccagagccaaagggcattgggaagaagtactaaacttaatttcaaagggctatataggccaagtaatatcttccttgaggtcactagtcatagaatcattgagaacaaacgtgtcaaatgaccattcaaagcttctgacccgacttgccttatcactcaatgcagagaaagaggcttatgactcatatttatcatttgttaaaatggaaactgaacgaaaaactgctttaacttcattaactgctccatttattaacacggataacgagtatgagggctacaatggatatggtaccagtgagataaatagcttgaatagagtaatttttaactctaaaaacctgctaaatcgccaggggaattcagttctgaccgaacttggaaccatttattacattaaaattgttagagaaatacacttgtactcctcaacagaggcatcaaggatatttattgatttcattaaggcaaacttacttcccaattacaattccacacatagtatagagacccaacttgacaaacagaataaaatggttgaaattaatggatttgaaaaatcagaaaaagctgaattggcccatttaaacaactctgattctttaaatttggtttctgaaactataatttcagaattagaaaaggctttaaaagaccccaattttgttaacatgataacatcagaagtaaaataccagaagttgttggataatatagcaataatggcatcacattggctagattttgaaactgctttgagagaaactacaggcccaatttacgcaaatttacttgtaaaacaagatgaaaaggaatattcgcccgatggtcttgtgtttttaagtaatgcaaccaagatgattcagtcaattttatccgcttatgttcatcttcaacatgcatttaccttaaaaacagttgttcaggcaatacaagtcagtgacacaatatacatctcagaaaatgaaaatacactaaccagcacactagtcgatgacgtgttttttatactacaaaagtcgcaacatagatcgattggaaccggtgatatacaaacagcttgtgctacttttaatcaggtttcttcaatcatatcaaatgaactaaaaaactctttaaccgacaatcttatccaaagtcagccaatctacgaaaaatggacacaagtattatattactcatattatattattccaattgtactagtccatccttgacatactttacattagtttttcaatctttacactactttacctaattatatactataaaatattctttgtgagtttatatgcaagtagaaactggaaaatttgatgagtgggtcactatacaatatgcttgacgagtatttcaagagaacaagaggtggtttcccagaattaatcggtgagttcaagttaaatagttattgttaatacaggctcaaagtatagttttgtccattctctaaacaatattgaagagtgtttggggttacttgctaaattcaaggaagaaatgactgagtgtttcagcaacgaatttctcaaaggttaattattatttctatagatatcaatggatttgatgccactttacttatatgcttagtaaagcaaacgaaataatatattttagataaggaaaaaaatctgttggtggaaagcgcaatacaggaactagattcagttaaaacagaattagaacaaattctagatacttgttgcaattacgcactgaatatgttcaaggtgatttttacactacttaatctacttatatatttagttatatacttgtggtggaataatgttgttaggaccatttaaatgaccctttaattaaattttcaatggttgattttgagatggatgaggagaaatattcaaaatttcaggtaattaacaaatacacatttctcgattaggctgaggagtctttttctgatgtagttgtctctgttctggacgtagttctcactcacatcaagtcaacttactccccaaatgttggccttaagtgcatgagcaacttgctagaaaaggttctacactacgctactcaatttttcacgcttattagttatttactcacctactaacgccgattagttgtgtaagtatttggagaatatggtgttggagaagaaattcacgatttatggtgcagtttactttgacggtgctataagatcactagtttattcctgttctaaacacaaccaacaacttaaaaaacaggttttaaaactaaatctattacttaatcctagctcaattagtgacctttatctattttattacacaatttacttattttactagttatacctatctaattatctttaaattctaactttatataatattacacagcttatgataaaaatttaattttatataaaattctgaaatttatataatacactgaaatttatctgttaatccaattgtgcttagttttcaacacttttgcaaatctcagatgtgttgaatgtgaataacaaggacgacttgattcttttgaagggtaatttcctggttatcatatgttatagaatcggaatacaaattcgacatttataaatactcctcacttcggacagatctaacactctaatcctaactactaatataccacacatgtatataatattaattattgaaatattaagtaaatgatccaagtttgggaatcttttgaagttaagtatagttttccagataacacgtccttgaggtcactgaaaacaagtataatttaatttcagtaccttaacttcatgtttaatctatatgcatatagatcactgagggattttggattatcgaagtatatcacaccctaatcaattatataaccaataactgaataaatgggagtaaagtactagatcggatgatatgttaattgaatccacagatatttttttgtacaggacccttaacagatcgaccaacttcatttcgagttttactttcaattttatacacttacaattacaaaccacgcaattctacaataatatgaaataggattagaagaggtaggttggtagagactacttgatcaggttgtagtttaaatttggataagtttgttattccatctccggaataaaagtaaaagttgtaattaaagtcctgagttaaaagaacattaaccattagagatgaaatgatgctattagtggttggaatgtttaggattgccctctaaaaatatcaagtaagatttgtgaagtacattacaaatgcgattgacgagatctaacgtaactcctttgatatgcttagattcagcgatcattttagaattttcatatatgtactctaataaaccctcctgattttcatcaagtgtgccggtgggagaaacacctgatggaccataatcaaaataaatatacagagaataatctgaattttcaatttataggattattacaaacttatgcaatcttcaggcgactgtaagttatcagttaatatacaaggaaatgggtcctaaatggtacaaagtaaagatcgaggaaaagtatatgtgataagtatgcaaagtacttctgaagaatagagagttaatgaacattccaagcatgaagtaaagcctggtctgataactctaacatgaccatataaatcttgggaaccaccgtcaattaatatttttaggctattgtcttcacttaattgagaattggtgttggaaatattataaaatctgtaaatctcaaaaaaagctgaatttagccatcttcgactttgaattgtatccaaagcagagaatattacgtcgaattcagataacaatttcagactcaattcctcaactcttccaacataactatatttgaatcagttaaagtatgaagtgaatatattgaatattaaaaggatgaaaactgacaattgaggaaattttgatgtgttccaaggtttaatattttcaaatgcaatttgtgacttaaacttaccgacatcgttttttctaaagtcaattatattgtgtggttaaaatactgaaataaaaattgccgatttaggtttgatagaaccactttatcaaagtcaacaatggaaatgttttcaaatccgtttaaaactaaacttttcaataattcacaacctaatacaccttttactcatttttcgcatttatttcataaatgttcaaatatacacgaatataaatggcataaacaatttcaaaatataggaagaatagtaaatagtaagaatggtacctaaaccgcctgaacctaccactagaatcctggactttaagacattgttcatatgggcctcaaaaaggtaagttcaaatttttacacattttttaaaaaaattaattattaaataaaataaataataaagggtatagaattaaaattttaactgaaaacaatggctaatttaaaaataatactaattttgtaaggtgtttgtgaaccaaattcagaattaatttttaaaaaaccatatttatgaaattttaactgagctactcaattacattatgttctttaaacttaattctacaaaactttttataaattatctcgtatccttctcagaattttaactcgaaatcttctaaatagtttaattattataactttatttcagtgataatattttgatcaatacatttatatagatacacattataaaattgatattatatgttaattatttcaatcataaacaacagtcgaatctaaaaatttcttaattccccatccagatccgtcaataatttcaagtgctttttataaacgaggtggtttattacaatggctaaacttaagcctacgtacctggtttgtatagtagttttgtgttctattaaagctgtgttatcaaacatattggatttaaacaatctaaccaaattcagctttaaaataatacagtataccaaagagaatgtaaataaaacaattatttactctaccaacgagagtccaataactcaaataaatgttggatcaattttattgtttaaacctttgcatggagaaaagatcaaatctgttacaattatgagattcaaaaatactaaagaagttcttttagttctggaaatcgaaaatgctatagctggtccccaaaaatactactctaggcgtaaaggaccatttaaaccaattgatgaaaggacatttcttttgaaatttgaaagtttaagtaataaacctaaatatgacccatctaaaattgtaacaccgggcgtagatcctaaggtacaaaagtcatttgaacgaaaacttcgtaaacgttttcgtgatgggtttttcaaagaaaaagaaataacacctcaggatgtaacgaatatagcaaatgagccgccaattgacatattaaccgaatcatttagtgatgaggagaaaggtgatgaatcatggaccaaatctgaagaatccactgattcatcgcctcataaatcatctaccgaggaaaaagaatataaaccagatatatcaactcatccaattgaacaagaacaaccagcaccaactgacgatggctgggatctggatagtattcatttcgaaatatcagatactgaagagccaactgaggaacaaaagaaacaacagagaaaagacttgatggagaaattaaaaaataaaatacaacacagaatggaagaaaaatctaaaatcgctcaaactgaaccagaagtgttaggcgatgtggatattaaagagttgctgggtaccgaagatgatgactttgatctggagagtattccaatggatttcggatcagatgaagaacagaaggatattgatcccaaattttcatcatcttatacgggtggtgaacccactcaacctcaaactgatgttctattggcagatgtagttcaggtggaagtagaatctgatgacgatgaggaaaatgatacagaaaaacagtctgaaccacaaactcaaccttcagtagatgaaaatgttcaagtacaagcagaacaacaacaagatggttctttaaagccagtgggaccctcacctgaaaaaagaccattttcatttgatctttactatgaagatccaaatgctgagcataaaatagcgaaaagaccaaaaggggttcgtactgaacctccagaatcaggcgaacaaccggaaacaactgaagcagtactgagttctggcgccggagccccaccacctccaccacctggcgatggatctgaaccaccggatggacctggtggtggtactcctccagaggaggatcaagaaggaatagttttagtggaggtggctataaaacgtatagtatctttagaggatccgggaagcaataaacgtgtaatcgtcgactatgaaatcaatgatggaataccaactttaattgtgaaggcgaaacctcataaaactgttactcatgttgttgaacaaggtgtaataatatgtgaagcagataaaggaagtaaacttttaagtttttcagccttttcttactacaactattatactcttattgaaatcatatttcaaactgctacaaacagttatattaagtatttcagaaaacacggtggagattgggtagaagttgatatcacacactttgaagcttattaccaagaacttagaggcaatgttgtaataacaaacgaaataattgttgatataagcttgccgctcgatccctttacaatattctctaaatttacagaaaaaaatggtttaatacacacagttctcatgcctatgcctggattttttataaaacaggttaattatggcacaagtttggtttggagttcacaatttaggcgttgccttgccataactctgacgtcaagaataggtgacattcccaggctcttaatgcttgaaatttctggtccgaatgacggcgtaactgaggaaatgcatttccacagacttggaaataactttacattaatcagccgaaaattgtacgactcagttgtacacgaagaccctcactatcacggttctggatctccatcaggctcagagaatttacaagaaatggaccattcagaccacactattccgtcaggagattcattttcaagtgagtcaacccctgatcaacaaattcaaccccaacagttagtacctcagactattcattttgaaatgccatccgatgaggcagatgaccaagaacctcttgatttatcacaatattttaaaaaaccagagccagaaccccaaacggaacatgaaacgactaaacattctccaacagaggatatattatcaagtaaagaagaggaatttgaagatgaacaacctctcgatctaagtgttaaagcacaatctgaatcagctcaaccatctgatttattagatcctgaaaccatccaagtagaattagaatctgaggaggaggaagaagacgaagaagaagaagaagatgaagaagaacattatgatgataatgatgaagattttggtggaggtgaaggtggtggaggtgcaggtgcaggtggcgcagttggtttgatacctttgcaagtaataaacaatgaaaattatgtaggaggaattcataaaggtgttccttatagaacgtatagtccacctcaaggtaaaatgtttgatgctattagttcaggttctaaagttatctggaaagcagttgagggctgtggaactgacaatgtaagattattttttgttacaggacttccacgattagggtttttcaggcaaataaacctaaaggagaatgatattagatacatttttattgtagaatcacagggcgggatatggaaaatggttgaagaacttcatttccatcaggcattttatgaactcacagaaccactatcccctagcactacctctcaggagtcctctcaatcttcaccagatacacaatcgcaagaatttcctcaataaacaatttacacagtgttgttcatggtgttaataatgtaaattatagacataagttagcctatttctacggttaatcgaaaattatgaataaataaaagaatatttatgaatattgaggtccaatatatctaaaattaggaacaattggatctaaattgtggacatgctagatctaaacaaatattattagatctaaatagaaaataaaatggtatgttaaatagatgccaattatatacaattgggctcgtaagaaaagtaaaatcgtatggcatttgccataatggtagtatatcattagtacatgttacatatatatgttacctagtgatgtttgatcaaatataatctgttaattaattccccatacaaattcataatcatttattaattcaaagagtagagttgaatcatgacaatggccagattgaggtttacctacctggttcctgtactcactttctattttataaatctcgtgtcttcagacaaactcgatataaatgatatatacaatttaaatattcaaagagtggaatattctgaaaatggaatgactacgataaaaatatatcctaccagcgaacaaccaattagacaagtttatgatgggcaaaatttagtttggtctgctctgttaggtgagagagctaaagttattacagttttaaaatttaaatattctggagaagtaattgtaaaagttgatattgactttcccgtatctaaatcacaaaagatatattgcaacagaaagggtaattaccaagaaattgatcgaaaaacgtgtcaagaaaaaattcaaagttttagtactatccaaaaatataatccctccaagatttatcaacccaaaactgaagagtatcccattccgcagatgcgtaaaacacgccaaaagagcaagacagaacgttcaaaacacctaagaggtaagcataagagaagaaagtatgttactcctttaaatgaagacactgaaacatcttcagaaactgaagaaattttgaagttcagaataaatgaagggacaaccagttcaacagatcacccaacaagccagagtactggtcaaccaccagatacaattacccattcagatggattaccagtaaatgtacatcgtgaacgaaaaattaaaaaatccaaaaagaaagtatccagcgtgtcaacacaagttttcagggaagaattagaaccagaagttttcgaattggaaatatcttcagacagtgatatggatgttgatgaatctacagatcctaaagttatacaatctgatgcgtctacacaaactgatactcaatgtgctattcaaactaaagcggctgagacacagacagatagtcaacaaactgaagatcctgttgttcagacaggcacacccattccttcagctcttccacttaagaaaagaccctacaagcccgattaatatcatcacagaccactgttattgaacataaaaagctcaggaatttagatgaaatgtaattgacatttaatggtatatatcaacattaaatcctaattaactgtaaataaaaaataaaaaagaattattcagaggataattaaataataaatataaatagataaaagcccaatttcaaataatcagcaattttaaagaagatttgtctcacctaatttcggtaaaatatttctaaaattattatacaccaaattgtaaaacaaatttaaattggataaatcaaacataaacagtttcataaaactcataattaataatatgactgtatcttttacatatttacacactcatatattatatacaattttgaacgtgatggaatctaaaaattttaattccccattcagatctaacaatgatcctgtaagatttaataataagggaatgaatattataaatggctacattgaaactctctcacatcatatttacattgtttttatatcaaataaaaattgcatcttcggaaatattatatcttgataatatagttggttccggtttcaacataataaaaataattgaaaatagaataacaaggacaatgatatattcaacaccggatagacaaataacacaagttcgtcaaggcaggaaactaatttggatgggatatccaggtgaatctattaagtgtcttactattttttcatttgagtcatcttcaaagatattaattactattgaaattgaaaatcctgcatatgatagccttaaatttatttacatgcacaggaactactttagatatgtcaccaaggcttattttgagaccaactttgcaatgcaagcaaagcctttaaaatcaccaacttcaaaacctattccaggcaaacttccaatccctagactgaagaaacccgaaaaacgcaaagctgatgctgaaaaaagtaaagaggctaaaaagaaaattgttggccatccaagcgaaacaaaaactgaagcagaacgacaaactcaaactgaattatatactacaactagtcaacaaactactcaaccacaaaagcagtcagagcctgaaattattcaggtagaggtaggatcagatgatgaaggtacagatgattttttagttgtttcaactagtcaaaaagttgatttgtattctgaaactgttgatacaacaactggtacggcaatacatccgaaagaacaacaagttaaaatattaactcaaattagatacacacagacagatacccatgaatccgaggatacagaaacacaaacagatacgcaacagtcaaaagacacagaaacacaaactgttatactaaccgattcaacggagacacaaacacttataccaacagattctactgatacacaaacagatacccatgaatcaaaagaaacagaaacacagacagttataccaacagattctactgagacacagacagatacccatgaaactgaggatattgggattcagactaaattaaggactagatatcctaaaaaacaacatgctgtaaaaaccaactcagttcaaacacagacagaaatggttgttccaatagggggcgagtttgatgatgaggattcagaaggagaaattattccagttttaataggatcagatggtgaatatgaagaattacccatgtttccaggagaagaagaatcagatatagaatttcaaatatcttcagacagtgatatggatattgatgaatctacagatgatcacattatacaatctgatgcaattacacaaactgacaaacagaatgataatagagatccttcaactcttccaattaagaaaagaccatataaaccagattaatccaaaattatgaataaggaaaccagaattagttatttaaattaaatgttagtgacattaaagagccaaatttaggcttaaaataataataaattaaaagtaagttaatgtttaattgattataaaggaaatcataaaatttgattcaaaactaatgggatctaaacaagtattattagatctgaatttaatatacattaaaatataaaataagataaattatatatatataaaagatatattcagtattgtatatcaaatgtaaaatagtgtgataaattccataattgtatttgtggcatatatgtatgcatgaatgcgaattaaaataacgaaaatgaagctttttttctaattccccatcaaatcttatcaataatattatttgattttaatactaataactttatttgataaatggtcagagttaatattttatacatgtcctttgtactaattgtatgtcgcataaagattgtgtcttcaatagtgttggatataaatgatattgtcaattcgggtttaaaagtctttcaaagagttaaaaatggtataattacaaccaaagtattctcaagaccaggaatgcctataactcaaatacttaaaggaagtagaccaatctggaatggttaccctggtgaatccgttaggagccttactttcattacatctgaatggtctagcgaaacagttttatctattgaagtagacaatccagttaaagaaccgaccttatatctgcataccttttataaccactataaatatattactatccaaagttataatcaaaagattaagcaaattctcaaaggaccacgtatatgttttaaaaaacgtaaaaaggacaaaggcgaaacagatgatactggggaaccagaaaagaagattagaagacaaccaaatgaaacaactgaaccaccaccacaacaaccattagtacctgaaaccattcattttgaaatatcagatagtgaagaggaggaacctactacaacatctgcccaacaatgtcaagaagaccaaactcccgaacctacgaaaccattagtacctgaaaccactcgtgtggagattggatcagatgtcgatgaggaaactgacacagcatctggaccatcagatgatgacgatagtaacttattaaacgaatcgctatttggagaagatgtagagaagttgttagatcgtgaactttcttcaactggactatcaaaaactgaacttgactcaatattagagggcgcaacagaagaaaattaaacaactcgacaacaggtgataaaattatacaagtgaaatttgaaatcaactaaagactaacaagataaaaatgaatctcaaccaagcgatgaagattaaacaactatatctttaaactttccgattaaccaatatggaaatgtaaataacttattgataaacgaaaatacgagagatatattttaacgaaatgtcaatgacatttaatgagccaaataaaacaaatgattgcggaatacagtaatgtttaattaattataaatcaaattaaaatattggatttaaaataatataaaagaactggcactaatatatctaaatctattaaaaatagtgtttatgtaatatgaaatagggtagatatcgctagtgattattgatataaaatatatggtgtgtaaatatatgtttctgttatacaacaggtctgaatgaaatggaatattttaattaattccccgtccaaatttatgaataatattataaaatttaatggtacgggaaagaatatgataaatggtcagagttaatattttactattgttttatgcactaattgtttattgtataaagactgcattttcaaatgtgttagatctaaaaaatataagtaattcaggtttctgggcacttaaaattgttgaggggaatataactaagactatgatatactcaacagcagatagacctataactaaagtacgtcaaggaacaagagtaatttgggaaccttattcatatgaatctgtgaaatgtgttactcattattcatttgaattgcacaataaaatacttatgactatagaaattagtgatcctgtcgtaaatgatatgtattatttcaaaagacgtcgtactcattatgtatatatcagtaaaaaagaatttgaatatcaatttacccaattaagtcacccgccaccagtcttttttcaacaaacgaaacctaaaaaacctaaaaaatccaaaaccgctactggtaatactggaaaatctaagaagcctaggaaacgtaaagccgatactgatgatgaagaacctttaataattacaacccatataccaaccaacaaacctgctcaacctcaaccacaacctcaacctcaacctttagagcctgaggttgttcaagtggcggtggaatcagaagatgatgaagagtgcagtgaggtacaacaacttcaaccatcaattgataatagtatgttattatctgaagcagtatttaaccaagaggtagagaatttgttggaaactgactttgatgatatgggattatcaaaaacacagcttgattcattattctacaagacaaccgatgaatccattaaacctggtgaaccaactcaattataacctcaaactcaacctttaatacctcaaaccattcattttgaaatcccaaccgatgatgaagataaagatgagaaagatttggaactagaaaatattatttttgagatttcgaccgatgatgaagaaccaacaaaagaacaaacatcgcaactaataagacaaaaacttagagagaaaatccaaaagaaacaacagagacaagacctaatagataagtttgaaaagaaaaatgaagaaaaatcctataaaacttctgagttagatgatgaaaatgaagaagaaagtgagacataacaacctcaaccaactgattcagattcagaaaccaatggaactcttctaataaaacaatatacaagcccgaataactgatttataataaattgtgacatattaatttaaatgagctgttaataacatttaataagccaaattaagtctagggagagataaattaaggtttaattaattataaacaagaacaaatattagatctaaataagggtactgcaacttataaaataaattttaattggatatgcttaaattaaaattaaatgtaaaatggtgtgataaatgccataatttttattatatggtgtatacataatatatgtgtatcttatatataaagtctgaataagataaagttatcaattatttccccatccagatctatgaaaaatattataagattgacatggtaaacgtgaattaaataatgaacatattagatgtaaagtatctaggggttttgataattttcaattgtattagttttgtattttcagaaatattaaatataaaaaatttaactgattcaggtttttatacaataataattattgaagatggaataactaagaccatgatatactcaacaccacaaaaaataataacagaagttcgtcaaggaaaacgagtactttggactgctcttccaggtgaatcagttaagtgtcttactatttatacccttgattgggcatcaataagagttatgactatcgaaattaataatcccgttaaagatggaatgtattattttaatagacgttattccaattatgtatatgctaccaaagaaatgtttgatttcgaatatgcagaaatggctagagttgccaaatacatgcatgaaaaatattcgaagagttcggataaagttccaattcctgaacagaaacaacccaaaaaacgcaaagccgaaacagatgatactggggaaccagaaaaaaagattccaagtcaacctgctcaacctcaaccacaaccacaacagctagagcctgaggttgttcaggtggagatggaatccgaagaggatgaatctactgatacagcatccgaaggaccaattgaagaatgggatattcagaatattcaatttcaagtgtcttcagatgaagaacagaaggacattgatatttcagataaagaactcatattttcaccatctgatacggaagaggaacctgaattaatagctgaacacattcaatttcaaatatcttcagacagtgataacgatattgatgaatctacagatgatcaaattatacaatctgatgcaattacacaaactgacaaacagaatgataatagagatccttcaactcttccaattaagaaaaggccatataaaccctaataaattataatcatttttaaaatgtaaattacaattccataatgaattataacttaaatatttaaattaaatgttagtgacattgaagagtaaaatttaggctcaaatctagtaattaattttaatttatcacaaattacgagtatattattatatataaataaaaaatgaagtaatatgataaatagatctaaatttattataaatagtgtgtatgaaatacgaaatagggtagatatatcttgttataattgattattaatatatgttttgtacacatattgtatatatgtacaagtggtaaataagattgaacgatgaaattaatttagtaattggtcaatctaccatctaattgcaggaacaatattacaagatcattataaaatagtcaaaatatgataaatggttaaacttaatattttatgtctgttagttatactaattttatatcacataaagatcgtatcttcaatagtatttgacataaaaaatataagtaattcaaaagttgaagtagtaaggacggttgaaaatggaatgactaagactgtgatatactcaacaccggaaaggaaaataacagaagtacgtgatggatataaaataatttggatggcagatccgggtgaatatcttaaatgtcttaattattacgaatttctatggaagaaaaatatactcataagtgtagaatcaaataatccttctaaagatatgtcatttttttacaaaaggggagaaaattatccacgtatcgctggggttaattttgtagtaaaatttgaaaaaaatctttaccactcaactaagacccccaagaaacgtaaagatgatactaaaaaaggggaaacagacaagaagcctaaaaaacgcaaagccgaaacagatgatactggggaaccagaaaagaagattagaagtcaaccaaatgaaacaactgaaccacaacaacaaccaccattagtacctgaaaccattcattttgaaatttcagatagtgaggatgaaactattgaccaatatgaacctcttgatttatcacaacattttaaaaaacccactcagccttctcacccatttgctcctcagagtattcattttgaaatatcatcagatgatgatgaatttgacgatgacgaagaagagcctcttgatctaagcattcatcaagaacctcttgatttaagtattaaaccgaagcctactgaaaccacaacacaacaacaattagtaccagtaaccacaacagtagaaatggaatcaaataaagatacccaaatagaagagtcaactgaggaacataagaaacaacagagaaaatttttgatggagagtttaaaaaagaaaattcaacatagaatagaaggcaaatctaaaaaattagggcccgaaaccattcaatttgaagtgtcatcagatgaagaagagagtgatatttcagataaagaactcctattttcatcatctgatacggaagatgaacctgaattaatatctgagcagaccccaatgatagtaatttcagatagtgaggatgaacaagaaccaggcaaaaaaggtgatctaccagataaagaaaaatcttaataagtgtaatcgaatgataactataaaaaattacaccctagagattttccaataattaaataccaaaacctattaataacatatttaaaagataaattgtgacatattaatttaaatgagctgataattatatttaatgagccaaatcagggcttaaaatcatgatatttaaaatatcttaatgtttaatttaaaacgggattacgaacttaagttattgatatattaaatatattagtctaaattacatcaaattgaaaagatcttacatatataaataaataaatactggtctatgaaacctgaaacggtatggtaaactgcacaatattatatgataaatatatgatacatattatctcttaataagattaacggtttttataattccccatggtgaccagtgaataacaacataaaattttaattagttaaaatatgataaatggtctacttaaaattttatatctgttcattatactaactttatatcatataaagattgttttatcaaatgtgttggatttaagggacattaaaaattcagaatttcatacattagaattattgcaacaaggaattatcaagaccatgatctactcaacagcggataaaccaataaccaaaatatgtaagggttccagagtaatctggcaagcccttccaggtgagtctgcgaaatgcattaccctcattagatctaaatgggctccgggaaatcttatgactatagaaattaataacccaagtaaaactgatatgttatatatttataaagaatatttccattattattataccactgaggaagggtttaaaacaagatttcttgcactttcaaaaccacaaccaacaaaatacattaagcgtgatatacccaaaaaacgtaaagccgaaacagatgatactggggaaccagaaaaaaagattccaagtcaacctgctcaacaacaaccacaaccacaacagatagaacctgaggttgttcaggtggaggtggaatccgatgatactgaacttaccgataaacacctcagaaaggaacatttaagacaaaaaatcagggcaaagatacagaagaaaaaagaattaaagatgatgattatagagaaaataaaaaaaatatacaggataagatacaacaacttggtactcaaactcaattcaaaaaaccagaacataaaacgactaaacatactccaacagagcatatattatcaagtgaaagggaacaggaggaacctcttgatctaagtattaagacaaaagcacaaccagaagttttaccagttgaagtggaatcggatgacgaggaagaatcataatcaagtgattaagattaaacaactaataaatctcttttaataaaccaatatcaaaattttaaaagcttattgagacaataacttagaattaatgattttaatgaaatgtcattgatatttaataagccaaattggggcttgattattaatatattagatctaaataatataaacatcaaaataattaaaataataaaaataagttgttgattatgtataaatgctatatactaaatatgaaaaggggtagataaagttgacgactcttgttatacaatgtgtgtgttacatcaacaggtccgaatgagatgtatctaataatctttcaattccccatccagatctataaaaatattataagattgaaataatattcttttatatgataaatggttagacttaatatcctactattgctttacgcggggtttttgtatcacatcaagagtgtatattcaaacacactaaatatacaaattatagctgattcagggttttttacaataaaagtttacgaaaatggaataaccaaaattatggtattctcaacagcagataaaccaataacagaagtacgtcaaggaccaaaatcaatttgggattcgcttcccggtgaatctattaagtgtcttacttactaccaatttaaagggtcaaatagaaaacttatgactatagaaattaataatcctgttaaagacgaaatgtattatctccatatacataattacaattatgtatatgctaccaaagaaatgtttgaattcgaatatacagaaatggctagagttgccaaatacatgcatgaaaaatattcgaagagttcggataaagttccaattcccaaacagaaacaacctaaaaaacgtaaagccgatactgatgatactgggggatcgaaaaagaaaacaccagctgtatctgagaagatagagcctgatattgttcaagtggaggtggaatccgaagaggatgaatctactgatacagcatcggaaggcccaattgaagatcaaaaacaagagagaaaagacttaatggagagaattaattttgttgtttcatcagacagtgataacgatattaatgaactagaagtaccttttgatccaagcattaaaacaaaccccagtgaacctgaaatcactcaggtagaaatgggatcagatgatgacgatagtgacttattaaacgaatcgctatttggagaagatgtagagaagtggttggaaagtgaacttgaagatattggtttatcggaaagtgaacgtgattcattattcgaggatacaaccggtgatgtaactggtgatgatgaatcatcaaacgactaggaacaaacgctcctttgactctttctctcaataccgaaaacccaacaattacttataataatttttaatgtgcactagaattggggattttaatgaaatttattgatatttaataaaactaattaatgtttaattaatcattaatataatataaacatcaaaataattaaaataataaaaataagttgttgattatgtataaatgctatatactaaatatgaaaaggggtagataaagttgacgactcttgttatacaatgtgtgtgttacatcaacaggtccgaatgagatgtatctaataatctttcaattccccatccagatctataaaaatattataagattgaaataatattcttttatatgataaatggttagacttaatatcctactattgctttacgcggggtttttgtatcacatcaagagtgtatattctgttcttctggacctaaataatttaagtcattccggtttgcaggtggtaaaaactgttgaaagagatatatctaagactatgatatactcaacacaggaaaggaaaataacaggaatatgtaaaggttctaaactaatttggatgggttaccgaggtgaatatgttagatgcgttactcgtattttgtctaagtggtgtaatagcacactcattattatccaaattaataatgccgttaaagatgatacatattatatccatatagatccttccaattatgtatatattagtaaggaagagtttgatgaagtattagatgtaatttccaagttttctcaatggatgtatgaaaaatattccaagcgaccaaagaaaccagagaaacgcaaaggtgatactgatgatacagaaaaaacaaagaaaagatctacagttgaaccacaaccacaatctgaccagccagagcctgaagttacacaagtcaaatcgatcgaagatgtggaaagagagaaaaagagaaaagacttgatgatgagtctaagaaataaaattcaacagagaatacaagaaaaatctaaacaaattcaaatttccaaacctaagaaaccattagtacctgaaaccattcttgtggagcttgaatcagatgaacatcctaaggatagtgatatttcagatgttggactcaaatttccaccaactgaattagaacaacaacaacctcccgaaaatcaacaattagaacctgaagtcactcaggtagaaatgggatcagatgatgacgatagtgacttattaaacgaatcgctatttggagaagatgtagagaagtggttggaaagtgaacttgaagatattggtttatcggaaagtgaacgtgattcattattcgaggatacaactgaggaatccgattaaaaaaacatcttcaggtggtaaagataaaataagcctttaaactggtttacctaagaaaaaacatataaacctcaaaattttataattgttgagaagtaaatttcaaatttttagaataaattgtgacatattaatttaaatgagctgttaataacatttaataagccaaattaagtctagggagagataaattaaggtttaattaattataaacaagaacaaatattagatctaaataagggtactgcaacttataaaataaattttaattggatatgcttaaattaaaattaaatgtaaaatggtgtgataaatgccataatttttattatatggtgtatacataatatatgtgtatcttatatataaagtctgaataagataaagttatcaattatttccccatccagatctatgaaaaatattataagattgaaataatattctttcgatatgaaaaatgtttttttgaagaatgtttgtctgatctttgcactgatcttttaccatataaagattgtctcttcggccctactaaatataaataacattgataattcaaaattcaaggtagtaaaaattgttgatggatttgtgattaaggtgatgatatacccaactgcagataatccaataaatgaagtatgtaaaaattccaaaattatttgggaggttcatccgggtgagaagataaaatgtgttactcatattacatctaaattatgtgatgcacaacttatggtcatcgacgttgaaaatccagaaaaaaaatatacgatatattttagaaaatactatctacattttagagttatcaacgaaaatacgtttgacaaaatgttaaaaaaaattgttagatcttcagttaggaaaattagaaaacatggagatcctaatattgataaagataaaaatcgtagaaaacgtaaacttaaagatgaagttgatcacaaagctaggaaaattaaaaaaagagaaattactgaaaaatcagatccaatcgaagctactcaatccacaacatctcaaccattagaacctgtaaccactcaggtggtaatatcatccgatgaagatgaatctactgattcagcatctgaagagctaactgaggaacaaaagaaacaacagagaaaggacttaatggagagtttaaaaaagaaaattcaacagagaattgaagacaaatctaaggaaagtgagtctaaagcattagaacccgaaaccattcaatttgaagtgtcatcagatgaagaagaagcggatgagccaacttcaaaaggtgatgattatgataaggaagaacccccatctgatagtaaagacaaaagagatccttcaactcttccacttaagaaaagaccatataaacctgaataacctataatcatattttggggaactaaactagaattagtgatttaaatgaaatttcaataatatttaataagttaaattaaacaactaactgaagggtaaattaatttttaatttgtttaattaaagtgaataatgaggtgtacttaaagtttatctacaaatcaattatactaaattaataatgtaatataatataatataagttattgatatattaaatatattagtctaaattacatcaaattgaaaaaatcttagatatataaataaataaatactggtttatgaaacctgaaacggtatggtaaactgcacaatattatatgataaatatatgatacatattatctcttaataagattaacggtttttataattccccatggtgaccagtgaataacaacataaaattttaattagttaaaatatgataaatggtctacttaaaattttatatctgttcattatactaactttatatcatataaagattgttttatcaaatgtgttggatctaagggacatttccagttcaggctttgaagtagcacagacacatgaaagtggaatgataaagacaatagtactctcatcaccggatagacaaataacagaagttcgtcaagggagagaattagtttggatgggtcatccaggtgaatctgttaagtgccttactcacacgacgtttatgcgttataaaaaagcactcgttacaatggaaatcaacaatcctgttaaacatgatgtgttttatctttataattatttttctcactatgtatatactagtaaggatatctatgatgaaaaatttagaaaatattctaagcctccaaagtatttaaagaaactcatcaaaccaaaagccgatattgatgatactaaaaatcctaagaagattgagaaactcggcaaacataagggtgttgtttatgatactgaaccccctaaaaaacgtggaagatccagtaaaagcaagggtgatattgataatactaaaaaacctaaaaccccaagaaaacataataagaaaaacgatattgttacaaataagaaaatcagagagcgtaagaaaaaaactgatgtatcatctcaacctgtttctagtatattatcaagtgaagaaagggaacaggaggaacctctagatctaagtattaaacaaaaatctaaacaacctggatcaactgaagatcaaccattaatacctgaaaacattcatattgaaatttcggatagtgaggacattactgaacagctcgagcctgttgatctgagttctaaatcaggacttcagcctgaaaccattagagtggaactgatatcagatgatgagaaaattgaagaattatctaaaacaactgatcaactgattgactcatttggtacattgagtgaaccacttactcaccctccaccaactgaacctcaaagtcgagtagaaatggaatcaaataaagatacccaaatagaagagccaactgaggaacaaaggaaacaacagagaaaatttttgatggagaggttaagaaataaaattcaacagagaatacaagaaaaatctaaacaaagtcaggttcaacctgaaccatcaattgacttattaaacgaaccactatttgacgaagatgtggagaagttgttggaaagtgaactttcttcaactggattatcacatactgaacttgactcaatattagagggcgcaacagaagaaaattaaacaactcgccaacaggtgataaaattatacaagtgaaatttgaaatcaactaaagactaacaagataaaaatgaatctcaaccaagcgatgaggattaaaaactatatctttaaactttccgattaaccaatatggaaatgtaaataacttattgataaacgaaaatacgagagatatattttaacgaaatgtcaatgacatttaataagccaaattaaggcttgaatatactaaatacttcaaagcttaattgaaggttgattatttattagtagatccaaaaaatatgatttagatgtagatatataatatcttaagatataaaatagataaaattccttaaaaaaatataaaataaatgtcagaataaaataattacaactagtgattattgtatataatgtatggtgtgtgaatatatctaaatattattacaaaagtctgaacagaatggaatattttaattgattccccatccaaatttagcattgattctgtaagatttattagtacagaaatgatatgataaatgttcagacttaatgttttatatttaatctttgtagtatttgtttattgtataaaaattgcatcctcgttaacattggatctaaataatactagtatgtccgaatttcatacattaaaaattgttggaaatggaataattaaaaccacgatattctcaacaccagatagaccaataactaaaatatgtaaaggttgcagggggatctggcaagcccttccgggtgagtcagcgaaatgcgttacttatattacatctgaattgtcgaaaaagattcttatgattattgaggttgataatcccgttaaacatcaagtttattatctcaacagatgtcgtacccattatgtttatatcactcgggaacaatttgaaaaagaatttgtcgaaatatcttacccaccgtcaggtaaggttcccattcctaaactgaagaggcctgaaccaatcaccgaggcactacctgttacttacgaagataataaccctaataagctaagaaaacttatgaaaaaacctgaaactgcagaaacaacaattggtaacagagaaaaatcatctcaaacacttatgcaaacacaagtcgtagagactcagttacaaccagatctgttagagcctgaaattgttcaagtagaggtggaatcagaagacgatgaagagggccgtgaagtacaacaacttcaaccatcattttataatgatagtgaattattaaacgaaccactatttgaagaagatgtggagaagttgttggaaagtgaacttgaagatattggtttatcggaaagtgaacttgattcattatttgatgacacaagtgaacaacaaaattatgaaaacgagtcagaaaaatcatcaaacgattaaaaacacaaacttttttgactctttttgtaaatactaaaaaaacgtaagttacttattatcactattaggataaatcatgaagtacgaacttaaattaaatttcagtgatatttaataaaactaataatgtttaattaattataaatcaaattaaaatattggatttaaaataatataaaagaacaagcactaatatatctaaatctattaaaaatagcgtgtatgtaatatgaaatagggtagatatcgctagtgattattgatataaaatatatggtgtgtaaatatattttattttgcacaaaagatctgaataaaatggaatattttaattgattccccatgttgatcaatgatttttttgattaaaatagtatgggaaatatgataaatgatttacttaaagaatacttttctaatatttgtagtatttgtttattgtataaagattgcatcctcgttaacattggatctaaataatactagtatgtccgaatttcatacattaaaaattgttgaggggaatgtaactaaaaccacgatattctcaacagcagataaacctattactaaagtacgtcaaggatatataccaatttgggaaggcaatcccggtgagtcagcgaaatgcgtcagctattttaggtttaaacggcctgctaggacacttgtcaaagttgaaattgaaggttataatacaaattttgtttgttatttttttaaaaattttacccattataaagaggtcactaaaaattattttgaaaacaaatataaagaacttagtaactatgttgaagacttagaatctatagatattgatttattaatagctaagcagaaacaacctaaaaaacgcaaagccgatactgatgatactggggggtcgaaaaaaaagattccaagtcaacctgctcaaccaaaaccacaacagatagagcctgaggttgttcaggtggaggtggaatccgaagaggatgaatctactgatacaacaactaaagacccaattgaggaacagaagaaacaacagagaaaagacttactggagaagttaaaaaagaaaattcaacagagaatggaagacaaatctaaaaaaccaagtgaatcatcagtacctgcaaccacacaagttgacgcggaaattgatgaggaagaagatagtgatatattaaacgaacctcttgatctaagtattaaatctaagcctactcaatccacaacgcctcaaaaattacagttagaaactgttcattttgaaatatcagatcaagaatctgatacaacaactgaagacccaattgaggaacagaagaaacaacagagaaaagacttactggagaagttaaaaaagaaaattcaacagagaatggaagacaaatctaaaaaaccaagtgaatcatcagtacctgcaaccacacaagttgacgcggaaattgatgaggaagaagataktgatatattaaacgaacctcttgatctaagtattaaatctaagcctactcaatccacaacgcctcaaaaattacagttagaaactgttcattttgaaatatcagatcaagaatctgatacaacaactgaagacccaattgaggaacagaagaaacaacagagaaaagacttactggagaagttaaaaaagaaaattcaacagagaatggaagacaaatctaaaaaaccaagtgaatcatcagtacctgcaaccacacaagttgacgcggaaattgatgaggaagaagatagtgatatattaaacgaatcgctatttggagaagatgtagagaagtggttggaaagtgaacttgaagatattggtttatcggaaagtgaacttgattcattatttgatgacacaagtgaacaacaaaattatgaaaacgagtcagaaaaatcatcaaacgattaaaaacacaaacttttttgactctttttgtaaatactaaaaaaacgtaagttacttattatcactattaggataaatcatgaagtacgaacttaaattaaatttcagtgatatttaataaaactaataatgtttaattaattataaatcaaattaaaatattggatttaaaataatataaaagaacaagcactaatatatctaaatctattaaaaatagcgtgtatgtaatatgaaatagggtagatatcgctagtgattattgatataaaatatatggtgtgtaaatatattttattttgcacaaaagatctgaataaaatggaatattttaattgattccccatgttgatcaatgatttttttgattaaaatagtatgggaaatatgataaatgatttacttaaagaatacttttctaatatttgtagtatttgtttattgtataaagattgcatcctcgttaacattggatctaaataatactagtatgtccgaatttcatacattaaaattattgcatcaaggaatagctaagacaatagtactctcaacaccagatagacaaataacagaagttcgtcaagggagagaatcagtttggatgggtcatccaggtgaatctattaagtgtgtaacattttatatttcatttaagtggtcttctgaagtacttatgactatagaaattaataatccgaataaaactgctatgtattatcttcgtaaacaccaccataattataaatatatcagtctgcaagagtttgaatcaagatatagagacatggttattctttccaaacaactagacctgataaacgaacagaatatcagagaaaaagaattagtcaggaaaactaaacagaaacaaccaaaaaaacgcaaagccgaaacagatgatactggggaaccagaaaagaagattagaagacaaccaaatgaaacaactgaacaacaaccattagtacctgaaaccattcattttgaaatttcagatagcgaggaggaacatgaaataaaattagaaatatcagatgatgaacaacatgaaccacctggtttatcacatttcaaaaaacccactcagccttctcaaccattagtacctgaaaccactcaagtggaactaggatcagatgaggatacgttaacgacaaatctaataggtgaaccattatttgaagaaggtgttcaaatgatgttagaaacggaacttaaagatcttggattatcagaaattgatgcattatttgaagaacaatcagactttactgaaactccagcagtaccagaaattgttcaagttgaagtggaatcggatgacgatgaagaatcttaatcaactgatgtggtcaaactatacactagaactcttttaataaaccaatttagaacgttgaatgacccattctgaaactgaattaaaattggttgatttaaacaaactgtttataatatttgattatacaaattaaggataaatatggataattcaatctaaacaaaggtcaacatatataaaataataggaaaaccgtaccaaaatgtagaaaaattaaagtacaaccaagaattaaatatattcaaacataagtcaaattagaaaaaattgagacaaaacgtaaaataaaaatataatagggtagatatattttgaagaaatagatgatatatggtgtatagatgatattctatatatttgattcagaattataaatttaatctatatttaactccccatccagatctataaaaataatataagattgaaataatattcttttatatgataaatggtcagcttaatcaatgtttgtctaatatttgtagtaattgtttattgcactagttttgtgtcatcattaacattggatctgaacaatctgtttaattcagaatttaatacattaaaaattgttgaaaatggaataatcaagaccacgatattctcaacagcagatagaccaataaccaaaatacggaaaggatctaaagtgatctggcaggccctttccggtgagtctgcgaaatccattactcatatttcatctaaatggtctaaaagtatggttatgactattgaggttgataatcatgttaatgatgatatgtattatatttgtaaaactcgttcggactataaatatgtaactaaggaaatatttgatgaggaatttgtagaactttacaaaactttcattagtatgaatgaaagatattctaagcgttcacataaacgtaagaaaccaaaggacgatactgacaacactcagatacccaaaaaacgtggtaagcctaggaaaattccagctgaaccacctggacaaactgaattagaacaacaacaacctcctgaaaatcaacaattagaacctgataccattcgggtagaaatggggactgatgatgaggatgaatcaactgatacagcatcagaagacctaaatgaagagcaaagaaaacatctaataatggagaggatcaattttgttgtttcatcagacggtgatagtgacatggatatcgatgaacctacaaatccccagatcatacaatctgatgcaattacccaaactgaaccaccaaacgaacagagcgaaattcagaccgaacatgtattagaatctgaaattgtagataaggagctgatacccaataaacatctaaataaaggatcactagaattttctgatgacgaattagaatccgaaattattcaagtgaatttgggattagatactgatgatgaagaacctttaataattacaacccatataccaaccaacaaacctgctcaaccacaacctcaaccacaaccacaacctcaacagctagagcctgaggttgttcaagtggcggtggaatcagaagatgatgaagagtgcagtgaggtacaacaacttcaaccatcaattgataatagtatgttattatctgaagcagtatttaaccaagaggtagagaatttgttggaaactgactttgatgatatgggattatcaaaaacagagcttgattcattattctacaagacaaccgatgaatccagtcctgaagatggtgatgaatcataatgggactggtttgaaacaaccgatagaacccttttgatagataataaaagagatgaataacattttgagaaactaaagcagagttagtagatttaaattagatatcagtgatatttaataagccaaattgaggcttaaaataatactaaattaaaactgtcttaatgtttaattaattataaaaggatttgtaaaattagattattgttatattagatttaaattaaaaataaattgaaaaatctggattgtgcataatcagggtcatatgaagtgtaaaatagttataaattccataatgctatttgtgttgtatatatatgctatttatgtgagtgagataatgaaatttaatctaaaaatgttatttccccatccagatctagcaatgatcctgtaagatttaatagtacgagaatgaatattataaatggctacattgaaactctctcacgtactatttacattgtttttataccacataaaaattgtattttcaaatctattggatctggataatatagctggttcaggttataatatagttcaaacttctgaacgtgggataaccaagttaatgatattctccacacaagagaaaaagataacggtgatttacaacaaagaaaaactaatttggaaggggcatcctggtgaatatactaagtgttttacaatttacaaatttgagatgtcaaacattggactcgcctctctcgaaattctaaatcccgaatttgaaaacatcaagtattttagaagtcacaacttgatctataaaccaattaaccaagagacttttgaagctcagcttgaagaacttactaagtactcgaatgaattttccacgacaggtccaaggccatcaggacaaaagcctccaatattatcagaaagaataccaggtcatcctcgtccggggaaagttcctgctaccagaaaaaaaaggaaacccacttccagttacaattatggtaaaagaagaaaaagaggattaatcaaagaagcacaaacggaaactgattcaagtaaagcagctgaacaaatcaaaaccaaaccaatagattccggaaatttagaacccgaacatgtttcggtcgcactgagttccgatgatgatgatgaaccaacaaaagaacaaacatcgcaactaataagacaaaaacttagagagaaaatacaaaagaaacaacttaaagctgaagtttttgagaaattaaagaaaaaaataaaggacaaatctcaagaaacaaaaacagtatctgaaactgaaactgattcatcaactaaaccaaaatctaagccattagaaccagaaattatagaatcccaatcttcatcagacagtgatatggatgttgatgaatctacaggtcctcaagttatacaatctgatgcgactacacaaactgatacccatgaatcacaaaacagtgaaacgcagactgttatacaaactagttcaactgaaacacaaactaaaacacagaatgatgatagaggtccctcaactcttccaattaagaaaagaccatataaaccagattaatccaaaattatgaataaggaaaccagaattaatgatttaaattaaatgtcaatgacagttacaaaattagttgggcttaaatgatactgaattaaaaatatattaagctaaataaggcttgaaaacaactgaattatggttgattatacctaaatggtataatttgtgacgtaaataaggggaaaatacgcatattaaaaaattgaataaaaataatttagtgccacttttacattactaatatacttagcgaaaaatataattgtaagatccaaatagggtatgcgtagttctaaataacatatataataaaaaataaaaccacttaaaataaatgttagtttaaaatcattaagatttttggagtaaaactaactaaatacagccagtcttgattgatcattaatatttagaatgtgcgtacaagaactatattaaggttaagtttgttattgtttggtcaattaggaagataaaaaaatttgttaaatggtcaggctcaatatattatatattatcgttctactaattttatatcatgtaaagaccgtatcttcgttaacattggatctaagggacattgacacatcaaaatttgatgtatcaagcgttgttgaaaatggagtaactaaaacaacaatattaacaaaaagacatattccaatagatgaactctatttcgcgggtgaaatgatttggaagggtcgccctggcgaatcagttaattctattacacattattcattcgaaaatcatcataaaatgttgttgtatattgaagttgacaattcagcatttgaagatatattatatttttacacacgcagaggaatttaccttgatattactgaggaggaattttggaaattatatatggaaattacaaaagatcagcaagtcttttcgcctgatactagtgagcctacaatatcaacagacattaactatgagcatacagaagtagaaaaactcgaacctgatactgaatcacagtatacgccacaaaaaaatacgatcaaatctgaatttaatgaggatttaggccctaaaattattaaagcggaagtaggatcagatggagaagatgacgaaactgagttataacaacttgaaaagaagatcaaatttgaggaatttgaatttgattttgaacctactgaatgtaatctaatcgactatatattatcaagtcaagtagacgaagaaatagaagctgttgttattaaaaatgaagaatcgagtgaatcatctgatgaatattaataagtggttaaggtgaaacaggcaatagaattgttcaatcaattacagaaacaaatcatcgaataaactaaaatcaagcggaattaagaataaaacctaggagaaaataacaataaactgaagaaatcgtaaaatgcgagactgtaatagatttaatacttatgttagatggcttaaaaaaaattggatctataaaagataaacaagtgacgatctacaaaatattagtaataattggatctataaaaggtaaggagaagagaagtaataaaatgataaaataaggtaacggcgttgataatgttattatgtcatacacgtatatggtattctggttcaacaaaaatgtctcgatagagaacttaatgtattagttaattccccatccagatctatcgataaaattaaaagatatacaaaatacaaatgataatatgaatagattgagggggatcagtctgctgtatctcctaactctatgttacatcaacctctcatctggagtctatatagacatcaacaatttatatggaaagggtttaaaaattttaaaatatacaaaaaataatgtgaaaaaaacaattatttactcaactaccaatctgcccataactggcctcatggataacggtagtttagtctggtcagattacctcagcgaaaattgtgaaaaaataatcgtaaatcggtttgcccactcgagagatttaatagtagaagtgttccttttaaagccaatgttcactaaaactaaaatttatctgaagcataaaggtgagtattcacgaatcaccaaacagatttttcgaaacaaaatcaaaattctaagcgaaatccaaaactatgggccagaaaaaatctttacacctcaagttgaaacagctacaacaagtgagcagaccagaaaaaggagaaagccaacattgcaaccccaaacgaaacctaaggctaaaaaaaggaaaaaaacacccacaacaactaaagacggtcaaactagtgaagattctgaagctataatttcttcaacaagttctgactctgaatccgaaagttctgatttaagtcaaaaaattgatgaatccagcgatgactctgatgaatcgacaacatgtgaaattgatgatacaagttctgaatccagtgttaaagcatttgatcccagtcataaagttgtgttggaaaatgtttcggaaggtaatttaagcgataaatcagggggattgttgagtgatgtacctagtgatttgagttttgaaaggtctgttaccccggttgaaacaccaattccaacaccgtccgatcccgttttcgatgtttcagaaggggagttggaggctgaaattgtccaaatagaaatatcatcggatagtgatgttgatctatctaaaaacactaaaatacaatccgatgtaaaaaaaaccaaggttggttcctttaaaaagggtggaaaagggactaaaattggtaagactcaaactgatccgataaagacaagggtacgttcagttcaaactgaatcgaaacgaactaaaattggtaaaactcaaactgatccaaaaaaaaccgaggactcgcaaactcaaacggatgctaaaatagatatccaagagggtaaatcggtagatgaaaagaaaactgaagtttctgaattaagaataacggattcaataaaggcagaagatggttctcatggtgatgttactccgttggagaaaaaagtgtttccaacagatttataccatcaggattctagtttggaatttgaaataagaaagaagcttaggagcttgaaggagtcgaaatttgctgaggaaagcggtgataaaaaattaccatccaaatacattttagacatcacaaaccttaaaagtaaccccctgatatcttaccattatgaaattaatgacggaattgtatcactgataataaaggtaaaagagggtaaagtcattaatcacattgttgcagggaatcagcttattcataagtcgatcgttggtaaattattatgtttaacgatattttcactatttggtcaaatgaaattaatggagattataatggaagaagagattggaaactacgtaatgaattacaaaaaaggtgttattttctgggtggagtcagacgccaattcatttcaacagtcctatttggaccttaaaaaggagataacccacattgcagatgtgagtttggacattagtagtgaaattgatgaaagcttgctttattgtagaagtattgaaaaaaatggactttatcaattaatttattacccaaaaactggatattatttgaagagaatcaaatgtattacgagcttagtttggagatctgacacaagaagatgtctttcagcaactctaacaatggataaaaatgatattatcagactcatcaagctggaattacttgatccaactgataataatgttcgtgaattgcattttttcttatcaaatgacatttttacacgcatttctgaaagtttatacgaagaaattttggattctgagttaataaatactactcaaacacacgatgattctgatgattctgatgattcttatcatccaagccctattaaacaatttataaccactcaacaatttattccagaaactacaattcaacaaccaactccacagggtgctcaagaacccgaatctgatgtactaattccagagactgttcacgtggaattggaatctgatgatgaagaaattgacgtggtaaacttatcagacgaagatattactaaagtcagtgaaccagcggatgaaagtagtactacacataaggaagaaattgttaaaatcacacctataaaacctatacccattcgaccaatcccacatctaccacctactattccccctcctcaggttgctattcctccactacccactgtttcacctacatctgatactcctcctgaacctattgcttcacctacatctgatactcctcctgaacctattgcttcacctacatctgatactcctcctgaacctattgcttcacctacatctgatactcctcctgaacctattgcttcacctacatctgatactcctcctgaacctattgcttcacctacacttgccactgttattttaggtactaaaaagaaggataaagataaggaaaagggtaaaaaagataaaaagcctagaaagcctagaaagcctaaggcaagaggcgcgaaacagacctctggagatattagtataccaagcggtatcaaagatattactagcaaaaatgttgatgttgttgagattactgatagtagtagcgttgaagatgatggtgctgtaagtggtgaaacagttagtgttggtagtgaagatgataatgacgggcttactgtgcaaaaggtatcctttgccaatgcgttagttgatttaaatatattcgagagtcaatcgtttattgaggagagttatgatggaattaagtgtaaaactttttatccaccggaaggatatggttttaagcgtatattgtatgagaattttcaaatttggtgtggctggaactctgagtttagtaattttgtacgagtttgccaactcaaaggaggtcctatggtgggtctatttaggacaattaaacggataccatttaatatcagaagacattactttgtagaattatacaatgggaaatggacaataattgaagaaagtgatttcaaactactcattgaacaatatgtcaactcggactcggaagataataatgaagttacagacaatgaataaaacaaccataataatgacaattaactataaatcgatataaattaataatgaaataaaactaaatcaaggccaaaatatagataaattaacgggtaattaagtgtgtaaatgtggttagttgtgaattataacaattcgatggattaagtctgacttcttggggattctaacatatttacaacaacacaagcaggtgataattagaatgtattagtataatgaaggattaagtataaaaaatgtgtaaaaaagatccccatatgcattagtaataaaattcgcatgtttaggtgttataatatgttttaatgtaatatatgtttacacatcacgttttaataatatttttagcaggaatcttgtgtaaaaacgggaatgtgtgggcagaggatctggacctaaaatatgtaataaactctggattctcaattaataccacaacaaataatgggttaatatatacagaaatcagctctaatactcagaaacatataacaagggtcaaaaatggtgtggaccctctctgggaagaagaagatggtcagttttgcatgagcgttacagtagtttcaagctctaaacttgatgattctttagtttctattgaaattctaaaaagtgaaggctttgtaacgttttattacaataaaatggggaatttataccttagaattgataaagatgtttatgataaaaaaatcaaagatatggaaattgtatccaatagtaatactagtaataatgttgaaaatggtgctaaaaatgatgtaaatgatgttttaacgcagtttgattccactgataattcatttagtaattctgctgtcacgagtaaacaccccgaccacacagttcctagtgataatattaatgatagtttcgatgatattttggagaattataatcaaatggctgataaacatgagactaaaagtagaaatgtaaatgaattagaagttcctagcagaagaattctgaatatattggcccttgaaaataatgatagaatttcatatgaatacgagttgaatgatggaattccttctttaatagttgaagttttaaagccccaaaataagcgtattagtgtggtttcagagaatgaagctttgatatgggaggcatcaggttctgagcgtttattaactgtttcggcacactcgttttatggagagtacagacttgtagaggttatttacacatctgacggttcggataacatttccagttactacaagaaatatgataatcaatgggttcagtgcgactctaaggactttgaggacagttacatcgatatgaaaagtaagattgagattatcggatctgttgtccttgacgtctcagcccagccgaattcggacgaattttacctcaaacatgagaactcagaattactcaaagctacaacgttcttccctctcaccgggtatcatttaaaaaaagttattgatagtggtaaggaggtttggaaatctggctctaaacgctcaactgctgtcacacttattactaatacaaaccctgatatatcagttaatttgttgaagattgagataacaaatgatgagaaagactccgtcaaatattttatgaaggataattctggtaattacattccaattaataagcaaacttataatcaaattatcaaaaaccctcaatcctacactaatcaacccgatgatcaatttttaaacactgattttactaattctaacatacctaacccgaactcagtaaaccatataaaccctttgaatcatttgaatactaagaagttgggaatggaattggatatactgaatcatgattccaaatatgtattacaaggttcccgtaaaggtattgattttaagacttatttaccttatgaaggccgatttttccactcagttaaattagattctttttttatttggagggcccaaaatggtcaaagttcatcttttgtaagggttttctttccttcagcaaccccaagactcggtttcatcaacattgacattacccataccactactaatactactgataaccctgttagtacctctggttcacctaataactctgatattgttacgagatattttgtggatgattatggtatttggaagtttgttgaatttgatgttttttctaatcactttgacttctacttacaaaatgcagtaccaactcctgaaacctctggaggatcacagattcaaacctctttaaaggaagccgacccactcagctttttcattttcgatattaacattgatcaaaatcaatgatcaatggttttaaatgtagtttttgtttaacttttaatctcaatgtagtaatattcggttttctcactataaacttcttaatttaaatcttaaagttaatttaatattttataccattatttaaaagtttaaaatatacctactatactatatactttatatgtgtatgtgtatagtattaggagtatagttctggtaacgaaaaattttcttgcttctattttttcctcaatcttcacaatttaattatacaggaataatattactatagttatagtcgataatattaaaaaattaaagataatgataaaagaggactttcaattgagttgatttgcatgggttaaagtagagcttaagagcctttccgctctgcaataccacgcccatactttcgccctccataaatgcacaatccaatatattctccttattcataggtctaaacatttttccactaattcatactatagtatctactacactgaataattaataaaatcgattactaacctgtatgaacaaatgtatgtgaaagaatttaatagcataactgttttattaacgattttattgcaaaatttatcatatccacattttgttgcggggttagtcattgaatatttatacattttaaagtactttcccacgttggaatgatcattattaatatcaacaatacacgaatttgcaaagttgactttacggcgttggtttccaaattcgcaatccctaatcgcttcctgatcaatttcatacacatatagtttcggacggtcagtaaccactgccaaccatcttgaatctttatcgattaaacactttgtaactcggccaaagcgatttgttttacgaaacacttgaatcaattcaccagataaagtgtcaaataacttaataaattgtccctcctgagaactcgtagccagcagatatccgttagggcttaaacctacggctgtaatctcacttctatgtaatttcatcttcaacactacttttttataacctccaacctcttcacccgactctaaaacttcactcaaatcaaacgtttccatacaatttacaggggtttcacggttttgttctgatgaaaaaagctcatcttcttctgaaaatactgattttcctttcaatttcgtatataattggacaatcacagtgcccctcagcttacctattccacaattaataccatgtgcaataattaatgagtaaatgttggccccttgagggtataactaagcacctaccgtatgtatgtaactgactagggaataactaagcttatatataattaagcttatatataattaagcttatatataattaagctatgtgggtgttagaagcaccgtaatgaaataccaggataagcgataatgtttaaggacttggaacttgaagttgaaacaatacccaacaagttatatatggtgcttgaacaatccaatagacttacatcactcatttgatacacatagactctatatttcaataccacaaccaacctataatcattttccacttaacccatcaaggtttattatatagtcaaagatattgactgttaagatatatattatagtaggttaactagatgactagtattaatagagtcaaagagtgaataaataagtgtatatataactaagtacccctccggggaagtacaagcaccgtaaagcagtacatatcatgcatgagtttgatgttgagtatagaatcattaaaaacaagttgaacgacctcaacatgttttttatcgtcccaaactgtaacaacattttgtttccagggcttaatgaacttatgaactgatctcattgcacctttgcgaatgtcataatattctccatttcccaccaatgccaataaattggacctatacaacatctctgcgattccgatacttccaacattcttattgcgcaaatctaccacatcattattgcaatatcaagtgtattatttattatcgcgtaatttaggagtaaaataacggaaaattccatgtaaacaacataaatatcaataattgatcgggttagaggaaatacattttcctatatcgccaattattttgattcgttgtcacgagtttacagtttaaaatagttaaagtaatcttgtatatatctagtaaattgagtagtttgtagaaggaattgcctgcacgcaacacaatacctcgatcacaggtgataactagcggattagtatttaggattttgaatccatgatcattggccacacatatgcaagttccatcctgattaaatctagcatcattaaaagacatcttaagcacctttcatttcaatattatcccctttaaatagtattgttttactattattttattaaaatttaggataatttgaaaatgtgtaaatttaacactaaaaaattaatgttacgaaatcctagtcaaaaatattgtataccgattttacaaaaatattaatgataaattataaaaaaatctgttcataatggccgacttaagaaaagattatgggtaaaaaattaagtgagatgaaaaggtgacaattgatgttgaaggtggagtctggttttaagccaaagtgccatggtgtttagcgatggactactgacctggttgaattttgggcacagatgtgaaaagactccgtcaatatattttagatcctctgtgtttagttcacaatattttggtaaatgatctcgaactagttcatcgtcccacgaaaatccgttaaaagattctaacattccctttttatctccatctgaaactgaatttatgaacttatttatcttctccaaatcattcaataaattactcaaataccctgaactcatcttcacgacaacactaccatttacactatttatcacttttaatattattcttatttagttaaatatattttaattttatttaatagaatattcctaaaaaataccatttaaaatatgaatagtgtcaataatgttagtaattgggtaaattaatttaaaacgtggaatcccgggagctgtgttaaaaaatggacggggaaataaagttgatggatttgatagacactgtgaatggtatgaacgatgttgagactgtgaagtcttattgtttgtccataatttctacattgcaaaaggagttgcaaaacaggaagtcaagtttatctgacattcgccttctcagaaattcttatgaaaaatctgttgaaaataatgaaattttagatttaaaggctaaactgaacaaatttagcaccgaaaatacaaaacttaaagaacaactaaattctaaacaattctcatctcaatcgtatctcactcacactataataaatttaactatattatatactcttaactatgctttatttacgcataattttgagttagtttaccattaatttagtatactattagttatgtggttaatattaataggtacagtttattattatgattgaaattgatgtgtagagtattgggtagatatttgattgataaggttcgtttactgaagattgagaatgatgagttatcaaagactctattggaaaatcatattcagcctttatttattgaattgaataaagaaaaagaacttaacaaattaatggaaaagagattaacgtatcttcatcacggacttttattccctctaatcctctcatagaacttagtttcttagttttacatacttttacagttacctactactatgctactatttatactatatcatgattaatatagagaattacacttaatgaatgtccaattacgtaaggataacagttatctatcacacaagtccaacgaaccctccgactccaacgtattctctacttatttcactacttatcttgggattatttttatttcattttctagttatttagcttatatttggcgtaatacccctatctgggaataactatttttcatttgattttagagaaagagagaagaatcaacgcgtaaaggcatgagggatcgttcatcatcatattctcgtaataacagtcgttcaaaacgttctctgtcacctcgtagaaggagttcttctactgctaggagttcctcaccgaagcggaaggaacgtccttctagaccctcaccctattccaaaccctctgacaaacaaattaattatcgaagtaataattccaacgataaatcgaaatccaaacacaataaatcacatcactaatcacgctacctgttcggaaactatttttcattctaattattttttattaattttaatttcatctaatttatctacatgacaattcttaagtaatttagagtgattacagtctagtacataatctattgtgatgttgtagtgtgtatagatacattattttatataatcttaaccaaatttacataattttatataaattgattgaatttaaaatatctttcaataatttaacataatttattagttttttaatgtttttttccaaaattttaatttcacatttttaatataattatgataatacatgagaataacttcaagtataatacttctgataaactttgtaaatggcttagctgtgagtttttattactcttaatattactttagcctttacttgaagttaatcaacctccttatactctcatcaatgtgaatcttgaacacaactccaacatcgactctatctcacgtattctttcactaatacctccagctattcttgtttttaccaaatacataacatttatttacacattttccaattattttttcacaaatttaattaatcatgccacagttggtggtaatacaatgtataggtatgggagtggatgagcgagtttgttgtaaatagaatattaatttatttgcagaattccaaacaaataaacttcaacatttatcaagtattcttacaattgttatatcacttaactatataaaaattatctaacaattaactatataaaaattatctaacaattaactatataaaaattagttagtacactgttagcgctgttacatatgtgttaggaagagaagaacgaggaattggaagaaaagtataaaaaattaaagaaaaatcaagaagatttatacaataagatcatcctacaataactccattttacaataactgcgtcaccttgcaataacattttacaataattacgtcaccttgcaataacattttacaataataattcgataattataagttattgagtgtaaaattgagtaaataagcggtagtataatgtttttaagtgtgattttgcgtagtaaaaggataaggccttcaactttgagggttcgtttacctaaagtcggtctttctgatgattccaagcacattaagcaatctctccacaatatttacaaacaacttattcccagcaacacaactcctcaaaatgctaaaatccctaataatgttgaaaattctcaaaatagtaaaataatatcaaaatctggtcccacttctgataactctgaggcaaacaacactctagaaaatgctactacaactcatttaactaacactaccggtaccagtataaagctgaacaatgatgtgggtatgaatatcataattgataggaggaataagtatcataagaggctatggcagagtatgaaacgacgtgatttactatattttgagcgtctggttaaggaattccggtactttttattaattttatgtcacgtttagcaattccggtattgaatttacctcaacttcctacaccttaattttcaatggatttttaattttttacaaaaagcaatcattagaaaggctgagagaggtatttccgttacggtgcttgctcccacccacatatctaattatatacacatattcttactctgttatatcaccaggaagttcttagttatctccccaaggggtcctatttacacatttttacccataactctataataacacaattagttacctacaattctatactaacacaattagttattctattagtagtattatggttatgtttgtagttaattgaggaaatgaaagagaacggcgtgcatcctgctttaattcgatttttatcagtaatttcatcgataaattaaatttctttagagattaatgtgtgtttacttggaaatggcccaccttaactctatgccactcactcataactggctttccattactcgttcttcctggctcatttcctatctcatacacgttaaatcttaatattatccactgaccctcaaggtatattcaattatatataaaattaattctataaaaataatatacagttgaatcaaattatataagatcaaggaaaagtaagttttcatgttggaaggtggagtagaggtgtcttcttatgattcttctcgtgaagcccaggtcaactgttgagtattctctaaccgagtggacgagtgacacgcaaagttgtttcgcagtattgaagtcattgggcagtgaaattctttcaagtaagttacgtgactcgcctggtaatctgcagaacaacctcgttaaaatcctcgtcacgtatgatatcacatgctcattttcactcatttcttcattcaatcttatcacataattattacacaatctacaacattatgcgaaatatatattataaagttaactatacacaactaaattagatcaattttggtaaaaaataattaaaatttaatgaaaaaatcaaataattataaacttaatgagaataaatattgaaaattttagggttaggaaaaataacacttcctactggtatctacctgtatacctaattatttctgaaaactagttacaaattgtaaataatttaagaggtgtaaaatcttacatgttgagcagtttggctctgagtgtatcggagtcgataattttcgcgattagaaatgcgataagatcagccattttaagccccgaatccaaatcaacgttattcatacaactcttcaacatctacacaatttttaagtcaatactctaaactgtataactgtactagaaatgtataactaaatatacaagtagggatataactaaagttacaaatagtggaaaagagataaataggtagtaggtgataaccaaatataaagtacccctgtggggggtaacaaaacctagggagctacaactgattaactcataactaaaacttgttgtagggacaagccccgtggaggagccccgtaacgcagtacctgctgaaagagtacgatagcttccgaatcgttaggactgaatttcttccaaacgtcatcaagtgcttctctgcagcacaaactctcaaactccttcactatattcatcatctcatccatactattcttttctacacataccatcagcacatcaatagttatagtattatataagtatgtaaaagtagatatagtataagtagtattaagacccttgatagatataaataatgaactgtataactaaaccccagtagggataactaaaacccagtagggataactaaacccccggagggatgtgggagaatagaaatggggatacctcctgcaactggcggtgaaccggtataaacaccattaacaagtgaatctatggcaatttgtcttttatccagtaggaattgagtataatgtcggttaacttgtaacccagcagtaatgtactttccctcaacgctattaatcgagccggtaagttgttcttgttccacctgtttatgtatctgtgacactgaagttgccttttccttaaacaactttagtttccaattccttctcctcaaatcaattaaatcttgaatcttgaagtttattctcgtcgggtactttccgctatttctcaactgtattagtattcctgtatactcatccaacatctgcactccccctggtatctgctccactgtataccctatcgttgtcaataattccacaaaacattccaacaaattcatcggcggctcattctcaataccttccacattctgtacggcggcaggtggcacagagttattagtattatcagtagtagctgtagtagttgtagaagaagtagaagtaggaggagtagtagtggaagtttcagtagtttctacagcagtattaacagtaggatcagttgatgtagtagcactactattattcatgttattagcaatattaacaccgttagtagcggtgttagaggtggagttgagattttcttcactgctactaccgctactgttagcactggtaatattagtagtttgtcgtgagaataagagggtatttgaaatcctcttcaaaatattaatggagagaattttacgcagaaatagctcacccataaacctaatactgccgagaataacagacttatcaagggaggcgttggagttgatttgctcaaaggagtcttggcacttgtttagtaaacttttatgaaacaacgttgtcttgttcccaagatccaagatgtcgttgtaagaatatctcagtaagaatgccaagtcagcatacatatcagcatattccaattccgtggtacccttttcatgtaataagtccaccaacacctccacttcttctcttaaactcatttctctataaatagccacaatcttctctgaaactaccaaaaagttctccaccgtcagtttattcaataatgtacgtattgatctcttcaactgatccagtttactcattctactaactccattcactccattaacactacttaccgtgttaatcgagttagtcgctgagatatccctccattgaggtgttttcttagcctttttacggatcacatagttgagcggaacgattttaaatgtgcccaaatcttcaatttctacatcaaacacgccaaatgaaagtcttatcaaatgatcaaccgagtaatccaatccctgtgattcaagtttggactcagtgtgaggtggttctactacgtctaccaccaaactaacaggctcaaccatacttttagttatgctatccttaatattaatgttaactgggtcagcaataatatcaactgtgttcccattaactgttttcccaagatcaaacaggctatcaccggtgtcagcaccaaatggggaagtggtcggaagttctagacggttattttccttgatagtatcaacaataactaatgagtcatcaactatatcaactgaatcctcactatcctcagaatccactccaaagacaggcttaactattctcaacgggtcaactttactaacaaccggttcaactcgatcaccaataacgccatcaccggtttcagccgggacattgtagattttgcgtgaatgtgacttagagtgagagttgtgtgtggaaatattagggttcgggtgcagctcagataatgtgagtataatttccgctggatttataggcttattcttgatcttggtctttggcttcgactgcactgagattaacaaaatcgggggcgccatttgtgtcggggtattctcctgccaatccaaactcatagttacactactgtcattatcaactgtgtcactgttatcaactgagtcaacacttgccacggaaatcgaggcagtgatatgattttccccagccatctcaactaaatccacagtgtcctgagtcaccgcgttatctaccatatcaacaatattactactaggtatagcactagtcacagcatttgggatcgtagtaggcattgtatcaggtatggaattagtcatagcatttgggatggaattagtaatagcatttgggattgcagtaggaatagtatcaggcaccgtagttggaatactaccagtcatggtactagatacactactagtcatagtattggggatagtattagtcatcgcattagtaatagtactagggatagaactaggcataacagtgggaacaacagtaggtacagcattagtcatagtactgggcatagtagcgtcatgctcaatattaccagtaggaatattagtggtgggaatctcagtagtagtgggagtagcagtgttaactggatgaggtgtggtggcggtggatgaattaatgacttccccagtgtgtggattcaatatttgtaatgcggacctttgcctattcttcaataactgaattttattcaccacactactcacattaccagtgttatgagcattaacaccagtcatattcatagagttattcgggttaacattaaagttaactgcagtgccaggggcagtgttattatactgtgtcggataatatttgttaaaatttccataaggatagatgggacccacatagttgttcgcatagttgggtgtattatagttgggagtactatagttaggagtagaatagtttgacgtattgtagttagaagtgtgctggtatgggggggtggtgtattgtgggtaatatggactattatgatatgaattattgtaatgctttgaattcttacgttttgacttcatattaacccttctttttacactactactttctacattctcatctgcctcaccagtactaacaattgctgagttgttactgttagtattgagattttctacagagttgtccaaaaccatagcgtcagtgatagcagtagtatctaattcaatggagttctctgctgtgtcccctgaaaaagaatttactaatgtattttccaactcttctaccttatccattactatatcactagtatcagaaactgtaaccgctacaatttcaccaccattaacactatcttcaataacgtcaactgtgtcaaccatatccgcagaatcatctacgatatcaacagaatcatctacgatataagcagaatcatcaacaatctcagaactatctgcaacactatcaaaactatcaaccatatcagctgtgtcaaccatatcaacagtgtcaaccatatcaacagtgtcaaccatatcaacagcatcaacaatgttatcagaatcttctagagtaactggagttggattatccgttaaagtactgggctgttgtgatgtatcactggcgttggaaatggttttggagttgcgcctgaacaatctcatcatctctacaaatacaaatcagtattacaaaaataatcaaaattaacaatatttatccagaaaattttacaaatctacgagcaagaaatttactttgacccttgaaataattaaattgcaatcaaaatggtaatattacggtttaaccctcagtataccagtagtataatattattatactataattatttatatatggataggcatatgtgtggtataaggggtaatagttgtaatggagcgaatagaaataataggggagtgagtagtaccctgttccattacagtgagattaacaaaagaccccaaaattgcactataaaacaataaaatttataaattcacattaactcaataataatataaatagaatattatttattaactaaatccacttttctactccccacacctaaatcattcctactcatctcatcactccattatttaattctattatttccatcattctactattacatattattattctatactatagtatattggtacgaatgaattctatttttttgctgctgatttttcttcgtactctcggaattatcttgctcgaaattgtgtattaatattagtaatatatagttagtggcataagattagtgctggtattgatgtagtattggatacatggttttgaagacgtattgaatttcctgtgcggacttacagccagtgataataacatttccagaaacaaatattaataaaacagcctcagattcttcatttatacgacatctatacaccaatcctaaaacaacatattactatattatgtttaatttagtttacaatacatgactaaggcccttgcaggggatagctatataactagaattggaaacggcagttacgaacctgcaaaaaactctggttcatagttgcataaatctttatgttcttgtgaaaagacttcaagtcgaatgggaacattacagctgaaagtggcaataatattctcaattttaaaattattaaattttaaatctaaaccagtctccttcctaatcatcttagccattctctttccacccaatcttgtatcctctattgttttactacctataccagattagtactatatataattaagactccggagggaataactcctagtggataaccaagtatatatataactaagtgagtgggagtgtgctcggtaaagcagtaccagtaataataattcgtccagttctgaaaattaaaccagtacactttggattttgcatccttaaaactaaagcattaaatttcttgggattatattctgcatttcgggttgatattgcaatttctcttaaatccaactcctctcccaaatgaaccgaggcgactatattctgtaccatcggtacattcatgtctatactcatcattacttccagaaagaggtttagtaaactaacaatactctaactacaaattaactatggactaaatttagtaaaaaaattgtaaacaatagaaaaatatcaaaaaatttgaagaattcggaataagtaaagtaaataagggtttagatagaaaaaatactgttgaagggaagttgttgaagtttatttaaaacttgtgggttattggtatcgatattgagtagtaataagtccttttcagacgtttccgactcaactcgttcattattcttattcatcctaatattctatcactcttcaccaatattctatgttactattattgcagtattaaaatattattaaaaaagttgttggtaaaaaatgaaagataaaattaagagaaaaaatattttacatattaaggaatttggaaaaaagtaatttattaatttattctttattcccccattccatactcttgtacttccttatactgattataccattcataccattattccacttttattatagattattattattaaataaaaattaaataatatatttgggaagatgtgattttgtgatggatctgagatatttgtgtaattgtaatgattgtaatagtgttctagttacttttggccgcgttataatattatgtgatattccaaccaagttattatcatcttataatagtgagttaatatactcaaaattcagttgtaacgctattaatattattttaattacaaacgttaaatcatttcttggattaaacttgttaaataaatattttaacttatcttctacacatgttattactacttctcccattttctccctttctaccgtactcactacaactaatggtacaaatggagtcaatacacatacccttagcagccataggattaacaaagtgataaacaatgttagggagaaaaattataaatatgaatataaattacatataatttcatttaaccaatttttaacactaattactagcatcaatattgataataatattgatgatactagtattttggatgttggtactagcacggcagtggaaatggaaatagttggatatagtaatggttataattttggaggttgcaattatatgttaaggcatgggaatgtgagtgagaaactatttatagtctcaaattctagtcttaaaaacgacatttacaagtcctttaacagtaatattttccaacacactaatcctaatgattttatactctttctcagtactcctaaccaatgtaatactaataactctgtagatgtgactggtgtagaaaataccgtggaggaattggtgaataaaataatgactggcaacataattctgattatggatatattagacgaatgtttaatagaaatattattagaactatgtaatagaataacaacagtgttacaacagtaccgttacgtatattgtgttggcacaggtgttgaagagttatttgacttttataataagagttgtgagtgggtaaacgagtcaagagctgagaacacaatggatcctaatgacccaaatccaccatttccagaacttaccaatttaacacaaaacaacattttactaatcgcaaatcatatgaaagatattgtcaacatttataaatcgccatcaatcactttcctttttcatccatacaattctgataaaggtattaatacggataatagcgttaatataagtaatagtgtaaataaagtatatgtaatcaataatactaacgacaaaactattattagtggtaaaaatagtggtaatattgagtatataagggtgatgagaaaaaatgatatgaaagagataataaaggaatttgaaagtagaaagggtaaaataattttaaacgaaaatttattaaatttggatggaaatacattaacttttgaagaaaattttgttaattttggcttaacaaaattgaaaattcctattaagagtgatataaaatttaaaccaataaactctaaaatggatgttggtatgtgtaaaatgactgatggaatgttgatgggttgtgatcagagtttagaaataccatttggaacagtaaaggtggaaaaggttttaaaggaattaaaaagagcttacaatgatattaacgtaccagatgtacaaatgaataaggaattgttgattagaggaaagagttttgagttgaaaatcgatgaggttaggaatgaaattctgatcaacactaccaacactaaagattttaatactttaaacaaacttgtacttaatcttttcacacactattcatacctagttagggtttgattaactgctattttagctatatttggcatattattgtgtttaattctggtattatttatcaaaaatttagatataacttagtatatagcaaagaagattagattagggtttgattttgtatttgctgtagttattgtatgagattcctttaagtttaactactttaatatatccttgagggaaggatttcattaaatcctttttaggcttaaaatatttattgtaatcagattccactgattcataggtaaaataactgttcttacacctcttaacaccgccactatagaatctatgggaattaacggaggtattataaaaattaggatttttattagtaaaattataaaaattaaaaactttgtttaaaaaattagtggaattaagtttgttaaaaagattaatcattaaaaggcagtgagaataaaagtttgtgaggtgtattagagataataactaaatatgtagattttgtttttgtttattttacatttattttaataaaagagagggaatagttagggatgggtcggaagagtaggaagtcttgtaccataaagcccttttgttttttctgtcttcgtgaatttgataatgaaaaagtactcatccaacatcaaaaagctaaacattttaaatgtcccgaatgtaatcgtaaactagaaactgccaatggactattagtacatctacaacaggtaattcttactactatactataacatattctaattctatatcctaattctattaatttttaacatttgtttgtaaaattattatttttacagttatttacccctgatattagctaaaaacatataccatgtttgatactactatataattacccctttcggggtatttaggtccacaaatctacattgaatagagtcccaaattcattagaggggcgtgataacataacttcaacaattcagggcatgaatggcgttccagttgacatcatagaagaacaccgaatgcaatattacaatagactcaacaacattaataaacaaaaacagcaacggattaactggacccaaattcaactacccaattgtttcactcccactactactacccctaacttactttataataacaacactgttgctccaattgctgctgttactactactaataccaccactactgctgcagttgaaagtaataaagttgagaatgataatgtagtaactggtaataaattactaatattggatgcttacggtttaccaataaagcaggaaaaacctgataaagacactattaatactaaattacacattaaaccctttttaagcattaatcacaccaccaatgccaatgtggttagtacagtcaatagtctaaataatggtaatgtggtgaatgacagtgtgacaagtgtgagtaataaatttgaaagtggctgggatgttaaaagtgccaaaagtggagagaatatgaaggaggagaaggtgatatattacaaagttacagggacgaaacctttaccaataccgctaccatcaattccaaacaccaaactttcatactctactgatgacgtaatttttttactagttacagcagcaatagtcatagagaggaaatttatttcctctaacccaatcaactttcaacatttgttttcaaaatagttatttttttaattattttttcattaaattttacctaatcacatactaaagttaaataactttttgtcatgttgttccaggtttcaatagaagaattacgtgcaaaatataagtataactgggttgaatcttaaattttaataaaaaacattcaatatgatgttgtttcccttcttctatatattgttattatgttatcatacttatatgtatatacactatgtatactatatagcgtatacatagcacatagtatactacattatgaactatatttacgtgttaatttattctactcttaaccataaccaattagttttactatattattacttattaaagtgttttagtagtgtttttggtccattgaacaccgttaaatgtgcaagttatgaattgacgcgcacataccaatattactctattattcccttgatatatcactgaggttgggaacggttccccaggatccctttgccatgctaaacccaaggtcgtctctacactgtttacatacctatccttctctatcatctccacaaacccattctcaatctccaatataccatcatccacatcggtcacactatttgctgagttaaataattggatgtctagagatatgagtttgttttgtttgaataatagtgttagggtattacttttaagattaaaaagtagtttaatgggatatccatataatgggtttacccagtaactccagagtaattggtctttgtagattacgttcgaacaagcacaattaaacgtaatagtgaacagtagatctttcaactgattattacagtttaaatgagtaaatttctttcgatgcaaattggtaaatgataatttctcaatgtcacatcttaaatgtgtgatattgttccagtcttggtcattaccaaatttacaatataagactggtaatccatttaccagttcagctttatactctaatttgtaatctaacatgttaatctttcatagttttatcttaatatttactgatgattgggttaggccattcttacacatttttatattaacactgtaaacatttgatttagcgtttaattcacatataaataggattgccatacctatagtgtactacattaagaatattaagtatatatactatgtacatataaacacttatatatactgaggtgtattaatatatataacacttatatatatatatatattgaagtgtattaatatatattacattagagtttggatgttttaagtaccaatttttccacttcctaaatcaaattaaaactagataataaaaatactttggtaatggattcaacattattgtttgcgtttacgctatgaagtaaattctcgttattatagtaatccaccagtggcgcggtttcctttttatagacttctaaacgctttttaatgatctcaggtctgtcatctttacgtgttatcaacggctctcctgtgaggtcatctttaccttcttccttcggagggttaaacaccttatggtatacgcgatttgagcctggatgtaccaaacggcctactattctcttctctatcacttcgtctgacacgttaaatgaaaatacaccattcaatttctttccaacacttttcagcaatttgttcaactacattaaaaaaattaatactaagtatataatgtaattactttaaatactatatatattgtaagtggtgtaaatgccaagtaactggtgttaatagtgcattgaataactagagtgcgtagatacatctttagcttgtgagattgatcttggataaccatcgaggaggaaaccacgtcgacatttaggtgaattaattctttcttggaccagagataaagttaattcatcagggaccaataaacccttatcaataaactctttagcctaataacattacagtgatatggccagtatgtatatatattaagtatatagttaatagtataaatagctgtaaaaccaagtatacaaatctctcttagaggattagtaaggactgtaatgtagtaccttgaggccggttggtgtgccggatttaatagcttcacgaaataaatcaccagttgataaatgacaatagcaatggctattcttcaatatatgtgattgagttccctaataccaacattaatgccataattattactattacacaagggtatattctagataaaaagtattttaaagtagtgaataaataaaaattgtgtaaaattaggaataagtgaggtaattaggtgagatatactttcccggatcctggcggtcctaagaatacgaaattgccctgtggttttcctaggcagttgtatctgcgcttaagttccgagagtaaatcagtggtttcgaagtcctctaaatttgtcatttcttaaattcacaaatattaacaactcaacacaataatttaattcaaacaataaattaattacaaaaaattaacaattgaaatatgtgaattaatgataatttgattgaattcgtgaaattaacagaatctgtggaattggaaaatttagagccttaaaaattattaaaattgaaaaaacaatttaagtaatttgaggaatcaagtggaattattatttttataataacaattaattaatattctgctataattccccattattacacatatacccaaagattaaaccaacccatttataactaataacactgttaatattattaatgtagctaacttattaattgtatcataatactgtttaatttggttaataatgagatgctgagtatagttggccttggtcttggtgatgtcgaggatattactatcaaagggtttaaagccattaaaaatgcagatattgtttacctcgaaatctacacctcattccttatcaactccgataaacagaaactagtattcttatctatccaatcccttattcaccttccttattacacattttcaacgcttttagatgtttattttactttatctcattattttttactaaatatgtttacatacttaactatgtacagaattaggttaattgtggagtaggaggaatattatgggaaggagataaaggaagtggataggatatttatcgaggaacagaatgatactttattaaatgaagctaaggataaaaatgttgttttacttatcgcaggagatccttttaggtttgcgttgcttccaggcaattcctgatactataacattacacattatcccagttattacaattttctaacctaaccaccatttaattaattgtaattattttttactaactttacatcaccctcttggttaccagtaataatgatgtgttagtgctacaacacatgttgaaatatattataaagctatgaactgtggcatcgatgtcaatatcataaataacgctagtattatgaattccgttggaatcaccggattacaagtaattctaaaaatactattattaacattacttagctgtatagatttggtgagaccgtatcaataccattttttgaggagaattggaaaccttttagtttctacgacaagataatgcagaattataacaataatttacacactttgtgtttgctggatattaaagttagggaacgaagtgttgagaatattatgaaaaataaacttatatttgaggaacctaggtactccatcactctccctgatcccctctactatcaactcaatcctatttatttactcaatttacactcatttgtactattatttaatttacctcaaatcctagtactaacgttgtttacagatttatgagtataaataaggcaattgagcaattattatacgttcaatccaataacaccacacacagtaatccactattactattactataatattaccaactgcattaccaatatatgaaaaataggtaagattgattttatggtgattggtatggctcgcttatgttcaaaagatcaagtaattaaatctggcaaacttcaagatttattaaacttcgactttggtcctcctttacactcactcgtcatttgttctccgcacctccatcactacgaagaactattcttcaatcactattcacaataaagactgagttaaacgtattattggcagcagggagcgagttataatttttctaatgttataatgaatctacattgtcctaaaataatattgtggtgtaattatattacctccagttaataattgttgtcctatataaacgattttaaaacctttacaatttattaatttcaaactctcatcaatgctgtacaaatgttagtatgtacgtttacaatagtattagaatagtaaataataattaactgtaaaattacttgttgatatgcgatggtagtaggaaaatgagtcgaccatgtttgacgagtatgttaagagaaatttggagtaaaaaggtgattagttcaaggcaatttttatgcttcaaatcattctttatgtttttcattaatttgttattcatataactcgccctattacctataacattttacagagttttcaattatgagtattatttatgtaatttatacttataactagtgtatagcatgtaaatgtaatgagtaaggagtagcacaaattgtttgaatgaaaaagaataccatagggaggatctgtaataatagtgtcaacccatccattcgattctttaaaaggctaaaaaagattaactagtaaatattattacggaatatttgatatcaaatcgaataatatcagggattaataatttgtagtagttaaagttgacgaaaatattcttctcatctgtgaaattttattaatttgcaaaattacctgattcagtagtgttactcttaatataagagataccccaacccctcaatatacgtatatcaatatcactaccaatacaaaaaccactaaacaacattacaacaatactatactattatatatttagttttatgaaaaaacagttgaaaatatgtgaatgaatggataggttggaaaatgaagaatgattaactggatatgctgattacccaaagatggatgatgagattaatgagccaccagaaccaacaaagggatcataaactacagttccattcttcaccttaccctattaaatttttaaggagtaattttccacatacttaactatataaatctagtgtaacagtatatataactgaaaaattgaataaattaaaaaactaactaaattatgggaaacagcgtaatggagtaccaagtttgataaaataaatgaaagtgaattatcaagagaagttgggcccaaaataggtctattagaaagacaataattggtccaccaaggactgtcattacgctcgaataatatattcccaaaatatatcctatccaatttcttctcacaagtcttcttatttatattatatttctacacattattattatataatattattagtaatggtgtattaattagtatatataagtagtgttatgagaaaatacttcgataattgcgattttggtgattggattaattaaattgacatccccagcatgttgaaaaatgggtaataatttatcgaggactttaactatatcatcggaattcgatttattattatacttgctatactttacgcaccaacttttacccagcaaatgagcctctatttcatctttacacttatttaacacacagtccaataattcatcataatcctcacactcaacccatacctaaataccccgttaggtcttattatacaattaaccattaatatgtaatatttcttatactgtattaactgcatatacttaaaattagcctaatttatgtaaaataattgaaaatcagtaagttatattacagtaacaaagatactttaataacttctttgttgagtattgaacgatcaaaaatagctttagcaatatcaattgatggaacagtaccaaagagaaatacattttgatcagtagtttcaagtctgttgaagttagaaattgaactatcaggggaataattacgataatattcagttaaagattgggaatagagttggcaaggtgtactttcatccttataatatgataacttaaagtcttgagcacttacacccaaaagctcagccactgataataactcaaactctatcaactcattataatcaacatccatacgcatacgaaataaacatctttccattattttacactattttacactattttacaatttattcaattaatattattattttacactattttacaatttttcattgatttataatataaaatgtattatataatattgaacactattaatcatattaaatgtattcagaattatttaataaattttaaaacagtgtaaaatataaaaatatggtaaaaaatgttaaaaatgaaaaggatttggagagaaataaaaataagttgaatgatatttttaaaactttgaaaacgaataaggaaggtggagattctaagggtaaaatcgcatcaaaagataaacttgcaaaagttaaaaatactaaaattaataaattaaatgaaagtttgcataaaaagaaaataaaggccaaaaaggaggaatacagctcaaatcatataactcaaaacattcgcagaagaactattgataatttaccaatttataccatggaagaattaaatataggtacaaaatcactcttttttatccctaatttatggactatttttacattatttatactattaaacaaactattatatttcttaccttattactattaataatattatattatcaattatcaaactatttaaatattaatttaatgttttaagaattgaataaagtattttctgggccaaaaaatatgattttttaggaaaaggaggcgatacggaattatgcccttttgattgccaatgttgtttttaatatgaaaaattttaattcaatcattttattgtatttttaataatattatttttaaactgtacgtttttattaattgaagtgtgttacttattagtgggttaagttttggattccatcttatttaatgttattatttcgtaatttttcaacttttaaagatttaaattttagacttttagttaaggtatttttacacatttttatttactttatttagattcacattttttaaaattatcattattttttagggattaccttttgatgtaactgagtctgatattaaacaactttttacaggcttcaatttatcctcaattcatttcatcacaagtttctcgttcatgcgcttatttaattactaagttaattaattatacaattagttgaattagtaacaatgagtataattagggaggaataaaccactaggaagttgttatgtatacttagaagagaatgaagccaaagatgccataaaactactcaatggcaaattcttcaagcaaaagttcatcattacacattcactattatattaatctaataattactactattagtattaacagatgattagaaaattggaggtgacattggatttgttgaagattgacgatagaatacaattagtacataaaccggaatctgtggatagatttagagaaccttcaagatatcaataattttatatttaatggttggatttatgattttttcagcccaaagggcatttgtaagatgttttactacattttcaacaagttccctaagacagggaatggtatttttacaccaaggtattgctaattcagtttcatttagtgttactgttgttaggtaaatattgtgaagttgttagttttcgacaacttaaacaaggtcgtggctcaacatctatacaagtacgtcatcatggtttatttctcagacaacctactcagttttatcatttcactagttatatattctaaatcatctcaatttagtgtgttatagtttaaaactcgttattttatatttaaatatctaaataacaactcatgttgatttagttggagtacatggacctgatgagtaggaaagttttcacacagaattatccaataaactcaagagttgagagttagtccaacttaattaatgagtgattgtgtagaaattgatttggagcgccacaacgctttggttcaatatgttgacgaggattcaaaggaactaatcgtctcagatcacaactttgaagataaatccattaacctcagtctcgtaggtcaaggacaccagtttctctcgcgtactaacttactaccacttattttactattaatttagttatttgaaggtttaattgtaatgttatttagcgggtgacgagattcaagtttattatcattctgataacattgttaaagtctctcttccaaatcatatcctctcaaaactcaaataacacattttacaacaagtgtaacttgatctaacaaagttccttaatcttgcatcaaagtcttcacataatattaatgttagtttaatatatttacataattatctcaatgaatatatcagttatagtaatagtgataggttgatgggtgtgtagtgtggaaggtgtcaataaagagcaaaatgtagattttaatgtaatttaataaaatcgcaaatttatatttgtatatctgtatttatatatttatatctgtataattgtaaaacatatttgtaaatgattaaggagttaataaatagtttcgtttctccttctgagggcggaaatgggaaagaagccaccaattcctcaccctcagactctaaatctaaaaatcccgtgtaccagttcaagttagtaatactcggcgacgcctcagttggtaaaagctgtcttgttggtcgatttgttaaaaatactttcatggaattccaagaatccactatcggaggtttatttccactaattatcatgttttcactattatctaattatttaattgtttgattgtataatttcttaacatattagttattttatggtttagttaatgattaattgatttatttaacctttagaagttattaattatgactttttaataacaattttagctgctttcatgacacaaactgtaaaattagatgattgtaacgttaaatttgaaatttgggacactgcagggtatatgctcttttttacacattctttacatatacaataatataatagtattattttattattatcatgtaccagtttattattgatataaaatgttataggcaagagcgttatagaacattggctccaatgtattataggtaacccaatcaatagtgttaatatgtgcagagggtctgctgccgcaataattgtgtatgatattactttgaaggactcttttgaccaggccaaaagctggataaaagagcttaaatctcacgtggaacctaatattatcctaggtacttataacctcattatatttttcattagcacttgctggcaataaagctgacttagaagatcgcaaagttgatactgatgttcgtaaatttctttctccattcattatctattctggattactccttctatttatttattttgcactgtttaagtaactatgtacaccatattatcattattggtataatgttctagatggtacaagattttgcgtcagcgaataattgtttatttatggagacctctgctaaaactggtcaaaatgtccacaaactctttactgaaattggtattttccaaatatctaactacacacgaatccttacctgttagttattacttagttaactacatatctgacaattctgttagcgaaattgataccgaagtgtaagaggttgagtgagttccatgatgggtttaagatggaaaaccgaacaagtctcaacaagttcaaatgctgtaataactaatcaattaacaatatgttatatacatcatactactattttacatagttatttatatgtataatggatgttactaagggaattttgatctggactcacttaacaccaggaatgaatacatataggagcattccattgccatgatcatagacattatatagactggtatcattcttgacaagctccacggacccttctgttttttcggtaatgatggtgatatctttgggatacatagaaggatctaacttagtggaaggacgatgtgaaagatcagtgctgaggacccagcttttaccatcatacacatataaataatagtatggatcaaagttgagatatagaagaggaccagaagacttaaagtataaagacgtaggatatggaccagacacataactccacacacatataccatcaaacaacaattgagaacactcactacctaacaaatataacaacgagtcactattgggatactcaagaacctcacactccaggggaatagacttactaggatcaacaggatcacacttacacaacctcagatgtttatggaatacagaagttacttgaccagacacaacaggttcagagacatgagctttaactacaggttctaccactttggtaacaggttctactagctccttgactggttccactacctcattgtttcaactaccttggttactggttccactacttcattaacaggttctgctaactcattgactggttccactaccttggtaactggttctactacctcattgacaggttctagttctgctacctcattgactggttctactaccttggtaacaggttccactacagtctcaccaacaggcactatttgaaattcagtttcttctttgtattttcatctttgtggacgaagaaatcgttggaaacgaggcctaattcaagaatagtgataaccttatagttgttatcatcactagatttccagacatctttattgttatgtttaattttcttacacttgacaccgctcttaagtgtgaacctataagcgaaatcgactaggctaactgtgtaatctggtgtcttaagttccttattcccgtcggcatagaatttaactttagtaatgtcatgcctcttactggttatgtctgcccaggtatttcccttatcagagctgtggaacagtttgaatccattgttactaagcattatggctacatgtttctcgttaccctcagtcctgactcttaccaaactaccactcacattccctgttgagctccaaatttgagtgttaccctgggtaactttactgaacactttacctgacttaggagcgtacttatgatacttattatcatcactcttagaatagtcaatctcattggtactctgattcttggcaatgtcaagagtaacctggttagtggtagtaccagttgttacaggtgctgtcgctggagtagctgcgggagttgtagtagcaccagttgtagctgcgggagttggagtaacaggagttgtctttggttgagtaacagtagttgaaggagtagtcccagttgtagcagcaggtgttggaggtgttgtctttggttgagcagcaggtgtagcagctgtagtaccagttgcagcggcaggtgctggagatttggctggttctgccacaactgtcttagcctcggccttagcctcagttgctttaactggttcagcttcagacttaggaactggagcattgtcaagtggatatgatggaccaggttcgattggagcacttttatccttggtagttatttttgatttccactcattatcttccatgaagcaggtataataaactttttccaaagttacaatgattttatcctcatcctccttatatgtcacgaactttggatattccttaccgctttcatgtttccagacacagtttccattgtgtgctatcacttcacactgaagatcttctaagacataatcatagtcatcaaataacttctccactttacacgtgtgttcccctgatttacttgaatacagcttaacaaagtctggtgctgcaatcgacggtttcaatagagtaaacgtaggatcaacaaatgatggtctttcagtagcaggaacagtaccaacgggtgttattgccactttagcaaccacttcagcttctattactggtttggtttcttcaaccttttctgttggtttggtttcttcaacctttacttctgtttgtttgggttctatcttcttgacttcatcagcttggttcttcacaaagaatttatttgtggtaagaccaagtgtaaatgccttgatctccctaaactttggatcctcatcatgtttccataacacatcatctcccaacttcaccttctggcatttgacaccagtcttaaatatgaattcatatgataggaaagccaaatttacgttgtaatcagacttggtaatctccttatctccctcaccaaagaacttcaatttcttcaaatcaaatctatcaccagtaacatctttccatgctccgccagcgggtttttggaacagctggaacatatagtccttgagtagtatgaccaagaactcatcaccgttagggaatttcttagtcctaaccatagtaccagacacaccctcggattcccaaaccaaagtattaccctctgaaaccttgtcaaacacacagtcgttcttcctactgaaggtcttaacattattatcatcagtgaagtcaaactgatctgtacccttcgtggtctcaatatcaagactgatggatttgccagcagtagctggagtagcttctttgggtttaactggttcagcaggttctgctttaaccggagccgcagtcactttggtaaccaattcagcttctaccttgggttctatcttcttgacatcaccagaggcgttcttaatgaagaaacagtttgaagcaagacctagtgaaaacgcacttatcgtaggaaactttggatcgtgatctgatttccagacaacctcttgacccagcaacaccctcctacaattgacaccacttttgaatgtgtgactaaatgacatgtctactatagttacatcgtagtctgtctccttcagcactgtgtcaccttctccgtagaattttagcttcttaacatcgtgcctctctttggtgatatccttccactcattttgcgcctcttggaacaaactgaatgtacgattggttagtaggactacaaggtaattaacacccttggtttccttagtcctaaccagcttaccaaatacgtcagaaactgaagcccaaattaccttggtgccctgagcgaccttattaaacaagtaaccactcttcggagtgtatgtgatgactccattctcatccttgtagtcaatctgttctgtggtctgtttcttctcaatgtccagagttaccttggtagcctcagccggtttggcaggggctgtaactgctggagcggtgactgtaactggtgaagcaactgctggatccgtggcaggagtcgtagctgtaggagttacagcaacaggcttggatttatcaggcgggataatcgctcctttatactctattttattgtatgtatttttattagtggcgatgtagaattcatttttaagaggatcgaattggatcattttggtctgaaatccgggatgttggttttggttccaaagctcattatctccatacttcaccttcttacagttgaccccggcattgaactcgtaagtgaaggtgaaggtgttgtcatacccgaggacattaaccttgtaatcagctggtttaagttcagtgtcactatcaccgtaaaactttagcttgctgaaattgtgtctctgacagctgatatcactccacttaccactagactttttaagtgttacaaggttaccactataaagcagaacggctacattatcactaccctttttcgtggctaaggttccaaaatcgtcagggaactcccagacgaattctccccccttcataattttgttgaatccacaaccagatttagcagtgaatacgggatagttaccactccttgaataatcgaactcagtggtaccttccttcttctcaatgtcaagggttaccttggtaactgctgcagctctaaccacagcagcagacacgggagcaatgtcttcggcccctggaagacccgccactttcctcatatctatttcctttgtctgatctttaagacttgtgacactaaacttgttttcacgaagatcgagatagaagcccttaggatacccaaactcagtgtcttccgtgtggttccacagtaccatatctttttgcatgatcatcacacatctgacatcattcctaaattcgtaaccatatctacattcaaacacaattggctcataatcctccctagtcagttcatggtactttgaggtactctcttccagggaaaacatctttaccccggagaaattgtgtttatcattagtaacgtctttccatggttgaccctggccaatcttgctaaggagcacaaactttccgctctccaacagaattgaaagatgtttcacatccttgccggagcccatgagtactactttgagaccatagtccctatctttcgcagaccatatcttaagccctttctttacaatgttagtgattgacaaattggccttaggattaaagtgaccgaatcccctagtcgacctatagtcaaacaggtcattattcgaatttttaccgatatcaagagtaaagccagttgatgagacccaattacttccaaccctatgggcgtgaacaactctatcattgttcaagaatacgttaacgtttttaatacttgactcaacaccgtagaccaccaccttgctagaacactcaatgtcagtttttgcatcccaaaaagtattaccagaaatacatccaccgaggaagacatttttgaataggtatccaggttttgccgtgaaagtcctcctttcaccatcatggtgaaagtcaaacccaatggtactagaggtcttacctaggtcaagggatattttattagaagccttctgccatccaccgtctgacttacaataatgttcgatctgaccgttatacagatatatggtcacatatttggtactggcaaaggtgccaataccatcagtgaaaaccttggtagaatacttattaggatcattggtcgtccagataactatttcatccttgaagatcttgttaaacattgaactacccttggcagtatagatcttaatattcctgtgatgatcggtggtaaaatcgtagtcttcagtactggcctccccactgatattaagtgttacgggtcggccagaaggggctgctacaggagtagctttagctggtacagtagctgtagtctctggagccttaggttgtgcgggagctggagctgctgttacctcagtacccggagctgtgacttttcctttataaggtagtttcttaaactcagttttattcttcacaaagaaagtgttggaaatgagccctagatcaaacaacgtgatagagtcaaacttaggatcatcactgtgcttccatacatcatcatctccaagtttaatcctcttacatttgactccctcattgaacttaaatctgtaagaatactcaacgagggtaactttgtaattagccttggtaatttctctatcattctcccctaagaacttgagttttgtaatatcatgcttggtagaggttatgtcagtccactttccatcagttgacaattttagtagtacaaaggcataattatcgagtatcattgacacaaatgtaccatccttatcaacaacaaatatgactctcacggcacaaatgttatttttctgctcccagatgccagtagttcccttcacaaccttactgaacacttttccaggcttaactgtgtatgtatgacagttatcactcttggagtagtcgaaatcggctgcaccagccttcttatcgacatcaagggtgactgatgtgccagaaggagctgacttaggagttgatacaggtgttccagttgatgtaactggagcctgaggagtaggcgcagcttgagcctgaggagttgcagttgcttgagtaaccgcaggttcacttactgtagctgtagtagcagttgaaactttagtatctggatctttagctggtgccggagccgtagttgctacaggagctgccttctcaggagtaacaacgggttcacttacttgaggtgtagtagtagctacagtagatgcactgactggagtcacactagtcgttgttgttcctttcagttcaatctccttgaattcagactcagtctttagtacatagaatttgtttgaaatgagaccgagttcaagcatcttaaccgccttgggatcttcggtactattccaaatttcttcatctccatatttaatcttcttacagctattttcattattgaatgtgaacctgtaagagtaatctgctatggttgctgagtaatcactcgatgtgagttccttgtcactaccatctaggaacttcagcttcttaacatcatgctttgtagaggttacatctttccatgtattatcctccaaatggagcagattgaacgaattgttactcagtaggactgccacgaatttaccatcttcatcatctattaatatggctttagtaccacaaatgtcattttttgcctcccaaacggtagttgttcccttggtaaccttattgaacacactgttatctttgggagtataagtgtgacaatcatcttccttgtcatattcgaactctggagtggactgagtcttagctatatcaatggtaactggtgtgccagaagtagttgacacagaagcagcttcaggagtaccctcagcttgagtctgaggagttgtagtagcagaagtttcaggcgccttaggagtaggcgcaggttgagcttgagttgcagttgctgttctacttactgtggctgcgggaggagttgttccgggtgttgtggcaggagtcgtagctggagcttcctttggttgagtagttgcagttgcttgagccttacgaggaatgattgttcctttgtaatttatattcttaaaagtattttcatttttgaagacgaaaaaattgttagaaacaagaccaagttgaaacttcgtgatgtccttgtatttgttatcatccgtgtgtttccaaattacattgttgccatacttgatactgaggcatttaactccagtgttgaatttaaattcataagaatactcatggacaatggatcgagtatagtcagaactagcaatctctttatcattatcagttaggaatttcagttcggaaacgttatgtctctgactagtgatgtctttccaggccttggtattcttatccttgttaaatagtacaaaatcacgattaccaagtagtatggcaacgaattcatccttattttttctaaccaatgtcccaggtatgccatctttgcactcccagataacggttgctccctgggtaaccttagtaaaggaatgaccagacttcggcgtatatatatgaaaatttccatcctttttgtaatcaacttcatttgtaccttgtttcttatcaatgtcaagactcacagtcttagtattagttgcagatgcacttgattgtgattgcgatgcattttttgctggctgactattggattgacttggtgttgcttgagatggctgagttccttgagtaagactagtacttgttgctttaggtggatttgattgtgattgcgattgacttgctggagtttgaggttgcgatttaggtgtagaggattggctttgagattcttttaattttctcttaatatttataatctaaagtataaaatatatgtaattgattaaaatttaatgttttggtaatagtgcggagctagctccattagccacttagcctgaatttccgagacttgcctgatgaagtgtttagtggttagaaccaaatcgttgtaaacaacaaactttatattttgcttaaaaaccgacgagtttggatgaatatagaccacttgcttacttttaattgttttgtagttcttttcgctctttttctcgttcttaaccgcgacattggtaaagaacccactcacaatacacttcattattacatcattgtagttcatgttcgacccgatttctttatctttttggttattttgtacgtcaccattaaccgtatcaccatcaaccagattcaaccttgtaatcaaattttgcagttgttgtataatgttttgtatttggatgagtgatttgtactggaggtagttttcataacaccatgctattgaaaaatcattttccttccactgattatacacattcagcaacatcaagtggtcactgttattgttgtaaaagttcttgtaattgttctcagcatgtattctcctatccttcggtatgtaaaatatattattacctaaacgttgtgatatagagtttggatatgtatgtaggttaaaagagtgaataactaaataaaaaatactctgaatgagcattgatagtattataataatatcttcatggcagttatgctgaattgagaaaaggaggcttttagagtacattgggtccagtggtagttctgacatgattttacctagttttgtcagttctccagaatcgttaagacatccaagtgagtatatcaactccagagaatttattaagctttcaggggtaggaggatccataaaatcgaagtttaacaaatcgtcaattcctaaaacacattgcatacatacaaaaattacaaataaatatccctgagaaactactttgtaaagttacctatagatttcaataaaagcactacagatgacagattaactcgctttatttcgggctcatgattatcttccatttccttatcatatgacagtttcgtatataaacggaaacagtggcctgctctaactctgcctgccctaccacttctttgattcgcatttgcttttgaacatggtactactattaaactatccagccctataaatatatatcactataaatatactagtttacataaacatttacataaacattgtatagttatggatggaaatgaataaatgaacctgttttaggggaataaagacttaatttacaaaatcccgtatcaattacgtatactatattgtctagtgtgattgaggtttctgagatgttagttgacagaattacttttctggaattttctggtgttggctcaaatattttattttgcatatcactaggcagtgacgaatatatcgatagtattatcagttctctaatatcctttctattcttcagtctaagctcattatgaacaaacattaccagaaattacgtaactagtggaggaaatacataccttgcgataagttcttcctgtatgtactcaatctcttgttggccgggtaaaaaaactaaaatatcaccgtcaatcggctgtgtcaagtgaatttgcaaaattgtgattattgatgcgtccaggtaattagcctctggggtctttgtataatatatttgtacaggatatcttcttccaggtattctaaacagattatttaaacaccattttaactatacaataacttaataggacaagctattaataactaattaggattagtaattttaaacacacttgaatataggtgcattatcgaagtagagagcaaacttctcagcttctaatgtagctgatgaaataatcagtctaaagtcatttctgtatctgatcaaatccttaacgagtccgaagattacatcggtgtgtaatgttctttcatgagcctcgtcgatcattattacagagtaattttcaagtgtcgggtttgaggcgaattctctaagaagaataccatcagtcatgtacttaatcttagtgtttgagcttgtgtaatcttcaaacctgatacagtaaccgactgttgaacccattttaacattcaattccttactcacgcgagttgctaccgacattgcggcaacccttctgggctgagttattcctatgacaccggctctagagtaaccgacttcgtgcaagtattgcgggatttgtgttgtcttaccactaccagtctcaccaacaacaatcaaagttttatacttctttatagcacttagtagctcggtcctgtaatagtaaattggtaatttctgcctctcctggagtattagtttgtgttgttttctcttcaatttctcaagtctgctcaaatacttgttacttgtccttttctctttgctaattgaatcagattcgtcatcacttgatgaactaacgcttgtactttcaaagtcaaggtcagtttgtacgatgtttgtgaggtttacttcaggcattttagagtccagtataaagtttattgaatctccaacaagatctttaaaattacttaaatcgccaattaacttattttcagaatcttcttcaagttttcctgcctttgagtcctcttctactaccccaaactttgttattccatacttgtacagcttactctcccacaggtcttgctcattcactggcttatctttagcctttgaaagctgctgcttcttctttataacttctaaccttttcaagttatcctcgtcatagctatctggcaattcatacgtaattacactggagtctgtaggcctagttttaatagcggtttctgccaatttcactctctccctatcaagtttaagggacttttgtatgaattcatctctcctaagcttactatcgtacactatttccttttcacccaattctctttttgccaattcaagtctctcctcttcacgtcgttccaaatatgatctacgggcctcgtcacgcaacctttttagatagttaggattatctttcaaattcaagtttcggcccttactggcctccactgccaaatccatttcatataaatacttatcatactcagatgtatctactctactctcacctttactcttatccttagtattctcagcggtattattaactgaactggcgaaggcactatcagatgtgttacctgaaggcgaggtacgtttttggggattttttgaactagtagaatcccctcccattttttaaattaaggttatattacaattttttgttaaaatcttcactttaagtgaatttacttacaagctactatcttacatatacattttcctgttataaatcgtttaacaacggttaaatttaataataatttacatataatttgaaaattttaatttggactaattacaaagtttaaatttagaaaaaccgagtttccttaatggaaggtgaaggtgtttgagggatggggattcggagaggaataaatcattttatttttattatttttaatttttggggacaaatttataaaaaatgtcttatatgctacagcacttacgctctggatgggcagtggtatttttaaataatcgatttattctttttaggaccaagccatcgtgaccgaggaggaaagagtagtcgtaagtcttatttaaatttacttacacattttatttattttatgtatgtagtcactaagttttatcacttgtttatcttgtttagtgtattcgatttggccacgaccatgatcctgaatgcataaaaatggacgaaatactgtttaaaatcgctgaagatgttaaaaatttttgtgtaatttaccttgtaagtgaataatataaactaatttaagtaaagattagtatataatctttattatttatttattcaggtggatattactgaagttccagatttcaatggaatgtacgagttgtatgaccctatatcagtgatgtttttctacaggtttgttttaaatcttattaacataatttatttttctaagatttaactattttcacttcagaaacaaacacatgatggttgatctgggcactggcaacaataataagataaattgggccatgaataacaaacaggagctaatagatatcatcgagaccatctatcgaggtgcaaggagaggtaaatcctttaattatcttttatttttcatattttttttacttttattccatacacaatatagggcgcggtttggtaatttctcccaaagattattccaccaaatatcgttattagtttattttcgtcatttttaatcgcatttttaattctgtttcctattaatcataattattacactctgtatccatattttcaattatttttcccactctgtacattttacctattatttttgtaattttccttcaactattgatattttcctctttctcttcaccgctgttttaataaaacaaatgttattactataaaaatttcattatgattactgattctgatcttttggttggtgttaaattggcaaaaccaactaataaaacattttttaggggcttgaacaatacctctaatggcaacgacactaacaacacttccaatgactcacctaaattcatagatcacagccaggataccgatttatcccttacaaaagaagacggtgacggcaaagtgaatatctgggatcatataagctcattggagaagaagaacctgtgtttgaactgtgagaaacaccattttaaaaacaaggatataaaaatatgcataaaatgttctagaatttgtaagcgcctaaagtgtattcactgcaaagaggagtttgccgctcacaaattttgtaagaaagctgaaaagatctataaaagaactctatgtctaaattgtgccaagaacattgccacttacaatagtgaccctaaactctgccgatactgcaactgctgggcctcttggcgtgaaacatctgaatgtgaccgctgctttaaattcctggagaagtttggaaacccaacaaactgtgaaatgtgtaacaaaaactcctccttcaacactgaaaacaacttgaacaagatttacaacaaccttaaactttgctatctttgcatttacgagtttaaaaagaacgactactacataaaaaagaagtttaaaaaggaaaagaagtcccaagacgacccttcagaaagtaattcaacccattaaacacgggttttaaatacttatattctctattagacttggtaaattatggaattgatagatttcaatgaagtcgctgttatagagcaatagattattgcgataaaaaattaatattttacacttaaaatttatgtataccctagttattcattcttccaagtcctcctgtagactctcaagctcctgacttatctcgtcttcctggttatatttgatctgctggataatcttaaaattctcgatgattatcttcctgatgtactcaatatctcccaatttggttgaaaggaggttcgggttgaaataatcctgcacgaaggactggttctggtgcgacagcgacttgaacaccatgggccagaggttgttgtttaaatcatggttatatccaaaaaccagcaatgaatcgtctaaatcgctgtttttgttccttctgtactctcctgaggcgttaacattgttcttgttgttcatcttgggtatatttttattgtttatgaacagtagtaacaaattattctccgatttctccttgtttttattgtatatcgatatgatcaaatatgatatgaaattcaaatgataagattggctaataaagggttagcttaaattgggataatatctactataaagttacaatatctactataaagttacaatatctactataaagttacaatatctactatagtagtgagagaaattactttaatataatgtttgggtatatggtggtggtaagaattgtgttataacttgtgtttacagattttattttacagttgatgatctgaaacagttttaagaatattcaacataccagttgataaatgctcctgatgtactcataggtcttatttttcagtttgtacaagatattcttgtcgtagtggctgtcttcatttattctttctatcaatatactaaacacacaccaataattacggtacacacttacttatacaagaagtccttaattattatcttattttctttatttagtataaatagcaatatatacaaaatgtctatcgacgttatattcagtattcttcttttccaacaaagctggcctgtattcctctttacattcagcttattcttcagcagtgacaaaacattcttctgcttcaactatacacattaatatcagagtactagacgtatagtagacgtaattctaaaattaagagtaatgtagtgtaaaaatatgtcatgattatatactggagataggttggtaaagttggagttgtattcgttcaattttaggttgcaaaagatcctgatatcggacaaagtatcgtttgtgatatgggggtcgtatattaacacgtaagggcttattttcaatgattcttcgaaagtactacgcaaatctcgggtatattactgattacttacgttaaagttattagtggcgtcagcagtttgtcgttgtcgtaaataacgtacggcccacctagataattgtcaatatatatgtatagtaattaccctgcaatgataatattttgaagtaattactccttatttgctgcgataaactagagttctcgatgttggtaaactcatagcagcttagtattcctatacaggttgcgaataacacgatggccttatcacactcatttatacattctacaacctacgatatttagttattatttatcgataataattgcatatctatttatttctgtataaaagggtttattacggattctatcaacgatgacgtcgaattaattttatagaagttgttgataacgacgttgtcgtcctgaaaattagtgatttaaaacgagttaaaaaactttgtaattttcttcctgttgtatttcattcaatttatcgttgttatcttggagaaagaagtaccattcatcggtctgaaagtgataatacatgtgtgttcgtacgtgttttgtgttgtaaaaagagaggggtcttattgttgttattattactatctttaaaaattttctcaggttttctggcaagaaacgttcgaagtatagctttatcgagtataaaatctgctcattccaaccgtttattgccagcaatataactctcaaatatttatcaaactgaaaatactttccaaactaattaaaaaaattatttcaccttcaatgacgggtatgcggtttttattgccaatgtcttctttatgtatgtgtatatatccgattcatttaaaatagggtatgctgttaattttaagccatttctaaatttggtatggtgctgaaaaaatgaaatttatacatcatgtgcgttagatacttacctctagtataaacattgagcatattccgtcaacatcatgattgtagaatacaaaaactccgtattcctcggggtttatatcctttttattcagattgttttcgtttataaattcattcagttcatttgtaatatttaacacctgttcatcgaattcctcgactgtgaaatacggcataataaaattaaattaaagggaattgaaaaaagatgcttaacggaagtagagttgttatttggagttttttaaaacagcgaaaagtacatacacattgtcataaaaactgaacagagaacattttttaaggggaaaaatcgttgatatattttttaaattgactaatctagtattacaaagattcacaacaatttattatgttatggtaagtttgattccaccacaccaacagtgccttagttataaccgcattatttataaatatacatacatatttaattgttttgttttaagtataactaatgtataataatatgaaccacttaagttggtctaatgctaatatagctgttttaatgactgtctcaactaaatcaaccaacatatagtcatattttgaatatacaaatatgaaaacttttttaaaagtagccttctggaagtaaaataacaatttatccttaaaaaacacttcttggggttcatattgtgtacttatttgaatgtcacaatatgtcagtgcctattttagatcacgttccctggaaacttcttcaagtggccgacaatcaaaacatcatcactgatgaataaagaaggtctgatccttaacaacattaacgcaacacctggtaggtctgacatcattggtatcattggtaggactggtgctggtaagacaactctattatctgtgctacaaaacactgtcagaaatagaacaggtcaagtcctgcttgatggcagagatttacaagacattcccaagagtgtcctgagacatattgttggcgttcttccccagttaccttttgttttcaagggttggaccattagaaggttcttggatccaaggagactattcactgatgaacaaattaatgaagcattgaataactgtgggctcctggattttgtaaataaccttcatggtggaagaaaactagatacaataattacacccaaacccctaagtttaaaaaccaggtctggcgatcagtctaatatggaatcagccgatgtagacaagccactaactgaagattctcttaaatcagatgatattatgttatctataagccagcttagaacattatggttcgccaagctgatgctatacaggcatatctacagaatgttaatcattgatgagccgccatctgataacatttctgaggatggttctgaagttcaagatatgggcgtaccaatttacgaactactggacaaatacttcaaacactgtacatgttttgtgacagcgcactattcaacagttctcaaatcttgcacatcagtttgggtaatgcatcacggcagactcatcaagactttccgtgcatctgaagtattcaaaaacgaatcaatttcaaatgtaatcgaagagattgttaccaaatactcaaactaattttaatgcagtaatatttaaaattgcctaatggcatgtgtaatataaattttcagtctataaataacatatatacgttgtttaatttttacaatattattagaattcaagacacattttacaagtattttacaattttaaattttatattttttttttgattttaggttaaatcttcaccttaaaaatttacgaaatgatttgttgaattataactgataaactgatcagatcgttattgtgatacattagtgtgttctatgcatcgtttgttctcaggggctgcttcccatgcctcattcttatctgatctagtaaacacttgtttgaaaccatcacacatgataattgtcaaggtctgttcatcttcttcagagcaatctattatgactttagttgcgtactcaagaggttcttttgtttcccaaataacttgatcaaccgaacgacgacatccaaagctgaaacatcctgaggcgcaacaagctgaaccacaacaatcaaaatcacaacaagtacaataacagcatttgtagccacataatcctgattcgaaacaatcacattcgcaaccgcaacaaccagagccacagcaaccgggttcacagcaatcgcaatcgcagcaatccgagtcacagcaatcaccctcgcaacaatcaaacttacaacaatctgtataaaaataaccagtcctatgttctgtcagagaattgaacatataacccacttttggtatatatctttcaatttcttctgtctgaacataatcaaactgatcggtactatcctttacattaatacttaaacttatcgcgtttatttcttcacctaaataaagtctatggcacatatcaccagagtaaaatgcgtaaaaactatttctataaatgtcgaaatgaatttttgaggggtatccaagatcaggattaaacttataaagagttttatccttatattgaattagatcacactcaacattacatttgaatgaataaacgtatgatgtatttttgttcgttatcttatatagactagaaccaatttcagaatattcagaacgattgacgtgtttatagaatttgagatctgaaagcctacatcttgtatctgtgatgtcagtccagtctttgtggtcaccgcccttgtgaaatagaacgaatttcgattcataaacaaaaatcagcacatattcagatgactcaaagggtattattctaacttcagttgcatactcatcagatttggcttcccaaaaaacaatgtctggttttttacctttgacaactcgaataaatttataaccagctttaggagtataaattttgaaaaatccatcaacataatcaacctcaatacttcccctctttttctcaatgtcaagagctattttgccacatgctttcgaccatggtttatctccatccttataaaagtgttttatctcaccattagacatgtgaatcgttactctatttttacttgatctaccagtaccatcagttaagactttaatggcatactcttcaggattttctgtttcccaaataatttcattatatttcactactttaatgaatacccttttttccttaggatgataaaactcaactttagattcgtaatcctcgccataataaaacgaactctcgtctctgcttatgctaatatccaataccacaccaattcttgaataccacttatccttcttatataaatgtgtaagagtattatcttcatgaaataataagaaaaaaattttatttgaatcagtctcatataaaacaaccttgtttgcaaaatcaaaatgacttctagaattccaaaaggtgatttttgaatctattattttataaaacacaaaacccggttttgcactaaatattcttttatttccatccacactataatcgaattcagttttacctgaagtttcatcgacatttagtacaaaggttttatatttttccagccacttatctgttttgttcgaatcttttgaataataaaaatacttaacatgaccgctaaccaaatgtaccgttatatttttacaattagaggatccagaggtattatccaaaacgactttgtaggaataatcgttatcaccaccagattcccaaacaggggttttgtcatgaacaattttattaaacaaataactatccctgtaaacgaaggttggaaaatttgttttctccaaaaacacatattcaactgtgctttgtcttttcttgacatctaacgttattaaatcactctctttatctagcaatttactttcattttccatatttagaacatagaacctatttgaagatagataaagatatattccttttaaaaattcaaattctctatcaccatcgtacttataaactacctcgtctttatataggattttatggcatttcattatataattaaatttaaatccgtatgaaaacttatttaattctatcttatattgactggaatctagttttgtaccatcatccttgaaagccttaatatatgatagactattcctggtattggttatgttttcccacggtttattcttaccgctcttgtgaagtagtacaatgttgctattagtaagaattatagccaggtatttctctttattgactgattggacaaatactactttatttgtaccacaaccactttggtcttcccaaacaactttgttgcctttaactaacttgtttaatgaataactatgttttgtaaagattgtggtatagatatcttcggtggaaaatccatactcggtggtattttctatctttttaaggtcaacagatattatcttagatttctcttcccatggtttatttttactaggtctattaaactgtttcatctctccattgagcaagaaaatatcaatattctttgtagttccacatgtgcctagaccatcaattactattttggtggaatagtttttcgtatcatctgttttccaaatttcagttttgttatgcataacaacattaaaaccgtaaccaaatttagaaacgaaagttccatttttatctttcctagaaaaataaaaccctttaccatcttctctttggccaatatctaaactaagtagagtgaatgatggttgttcatctacttcttttgatgcaccaggtgcaggtctagtctcaggttcagaaactgcaaatgttacaggtgttggcttaactaaggttgccgtggatggagatgatggtttgaactctagtttcttaaattgatactcactcttgaggatgaagaattcgtttgaaataagacagagatcgaacatcttgaatgactcaaactcactatcatcggaatgtttccataaataatcttctccatacttgatcttgcggcagtttgcttcatcactgaatttgattctgtatgagtagtcaacgatggtaacattgtaattggttgacttgagatcgacgtcaccatggccaaggaatttgagtttcgtaacatcatgcctcttattggtgatatcagtccacttgcccgataaatgttggaacagtttgaatgtattgttatcaagtaaaattgacaagtatttctcgttaccctcagtcttagttctgacaaacgtacaatacacgttatctttggcctcccaaattccagttttaccctgaataaccttacaaaataagcgcccagtcttcggaacgtatatacaacacatatcaatttcagagtaattgaaatgatgtgtactgtcaagaacatcaatatcaactattactggcttgatagagggagccgatacaggagctttaactggacgtgttctagaaggctcggtctctggtttagaaacctctttaccaataatcggttcggacgattcttttactggttcgctcgcctctttaattaatggagattcaggttctgccttaactggagttgttacctcagtcacgcgaggggtgattggccctccataatctagtttcttgaaatcattttcattcttatagacgaaaaaattattggaaataaggccgatatcgagcataatagcgtccgaatattcggtatcatccgtactcttccatacgtcatcatcaccgtattttattttcttacatttaactccactgttaaacttaaatctgtaagagtattcacttacaatagataccttgtaatcagcagaagtgagttcagtgtcagcgtcacgataaaacttcagtgcagtaacgtcatacctatccttggttatatcggtccatggttgtttattagtcttgtggaatagtactaagttacggttctgaagtagtatggcaagatgtttctccttaccctcaaccttaattctgaccaaactaccatacacctcatcttttggctcccatataacagtgtttttctcggtaattttgttgaaagagtttccatccttaggagcgtatatatgaaacttcttatcggaactctttgagtattcaatctgttctgtgctcttagtcttattaatgtcaagggtaacaggtttcgtctcgcgagctgttgtaggtttagcctcaactgtgatagcaggtgtaggcttggcaggttcaggaggtttggcaggttccttagctgtaatgtggacaatttcagaaggttttataacctgatcactggatgggattggaacttctttggatacagcaggtttctcgggaggtttcgtttgttccttaactctaggtgattcagaagttacaactgatttatcaacgggttttgacacactttcggtaactacaatatcaggttttatctctggttttgatacctctattgggactggtttgggttctggtttagtctctggaggtctatcaactttagtatctgtcttagctggttttggtaatggtttggcaacagtcttatcactgacttccttagtaactacagattcagttttaggttcactaacgggttcagatacagtcttaagaatttgagaagtctcaggaatctcaggtttacgttcagtttcaacaactgttttcttatcagacacatctatataattgaacgatagtttgaatttggaatcaaagaaaacacatattttattatcatcaatgttgaatagtactatcctcgggtttcctctgtagggatactcagtggacttaaaaacgatgtgacccttataagtgagttcgagatacggtatattaattggcacgggatagaagtatccaaaaacccatttgttacaacttaatataaagttgtgaacacttacgggtttggcatctgaaccatacttattgtcagaggtcaacattctgaagttggataagtacaatttagatccaaatttatagtatgaatgttgcaaaatccagttagggatttcatattcaatatgttctaatttatcagaaacatcagatatataccagcccgaatcatatactctataaatggttgatttattctggaactcaaattcaaatgttaatgttcgtgaatcaaaaacaattcttcttggatatggaccacgggactgtctctttgtaacagtatgaccacgatacttcacttcgacacatctagcatctaaatcgaagacgtataagaatattccattaccatgatcatagactctataaagacacgtatcattctcaacaaccttcacggactcaccttctattttttcagtaaaaatggtgatattttctggatacagagatggttctagtttgacggaggaacgatgcgagagttcctctcttagaacccacttagtaccatcatacacatataaatagtaatatggatcaaagttcagatatagaagaggaccaggaccagaagacttaaaatatagagatgtaggatatgggccacatgtatacttccaaaaacttttaccaccaaacattaactcagtacactcaccacccaacagatacagtaatgcatcactatttggatactcaagaacctcaaactcaaggggaacggtcttactcctatcaacagaatcacaggtacacaatttaagattagaacaaaattcatctgtaggaattggaattgtaactagatcagaggtaggtttccagttgttgtctttaaaaatgtatgtaacggagcctctatcgaactcaatattgaatatattttgatgctttttataagtgaatgattttgggtatttattcccctggactttccaaacagtaacgtttttatactttattcctacgcactttactcctggattaaatttatacttctcacaatcattttcttctattttatatttagttaaatcattttctgtgaatttattgcgatgttgttcatctacagttaatattacaatagcggatccggaggcttttccctctgaatgattaccctttgcattggccagttttcggccatagcagagtaacaaatacaaaaacaaagttcttaaaattttaaatctagaattatatatcccattcttggtaaattcagtacccatccttttgatcttttcaggatgggggcgtacgaaatcaattacttgctaatttatcctatacacatataaatttattaaaattaattgttgtaattgtctggcagcctcatataaacttcagtatcgcttgttacgtcgattaaatcctctcttttaagttggcaccactcttcggtgttgttgttgtaatttatgttagtgttcaagttgtactcggtttgcaaataatccggtaataatttattaagctacaatattatgaaggatgaaaatggttgtacaaataatctaggtaattttatactgtgtatctatggaggtaaaaaaataatataactagttttaatttttattgataaatggcttacatcatgtagtaatacattgtcaacatatgttattagtaaatctctccaaccgtcacggtttaacaaccccaatcttggtctctcgacccttttgggcaacatcaggtacatataattttcagagcatcctactagacggtctaaccaggcctgatcatctacgtttttcttaagtttttcacgtctacatgtgcaggacacgttacgtgtgctgttaacgctaccaacgctgataaaaactttgtagagactattgatcctgggatcgctgttcaaaagctttatcagcctacttttagtgttatccggaacctcataactcatgcccgaaagactccgttcattccttttatttttattatcagctgttgctgagcaattaacataccttctatccttaagttcgtcaacatttgaaaccccgttaatatttccatcaatatcattagcgtttccaacaccgttaatcaaggctccgttggtttcgtgagcaccattattaataccatttgaaacaatggtttcatcggtcatatctttatcactgttatttacgctagaaaccgaaccatttaccaactccttggaattagacgtctcatccattgaactagaacggctcattgaggaatggttcagttgtacgttaagtagatcaatgttataatcatctaaatgaatcagtttactcttgttgaaggtcatatcgtcgtcttccgaaagtggagtgtttgcatcagtaacgttttcgtttgcattcccattctcttcccttaattttaaataacccacttcgtcggtgtggcattctccataaaccagggagactgggtgatcttcgaatgtgcttggttcgtaatgtctcgggagtgacatctttttgatgcttgcgaacagcagccagcactgcctcgggaagaggtccaaatcgttgtgcatgatgtatgtaaacttgttaaacttactaaccttgccactttcgtcgatcactgatggaagttggaatatttcatacattaatctgggcaggaaattttgtagaaccaaccttgacgagtgcttacttaggtttgggtgaaaccagatcgacttgatgcatctttcgtttgttatcaagcattctatcagtgctccgcatattatcttgctatactttggcttcttttcacatactgttccattttctttcaccccatttaccttttcaacaccgttgacattattatttagatggttttcatttccctgtacttccccagatgacggtttatcttcgttgtggtatgggtgcgtatttaacgttatcagaaggcctgaaaattcgggatctaagatatcctcatcaataatatcgagttgattcaatatttcagttgtcaatggccttagatcaaatggtatgttcttgtttcttggatcattgcttctattccatctagtctctacaaaaattttattgtggatagacaatttatatacggatttcatcataaaaatttgatgttgaattgtataaactaataaaaattacctatatatgagtaattgtggagaactcgacacttaaggaagtgtttatgcctataaatggttgttagtggttcgtattcttcgcctgtatccaaaacatccgagaatgatttagcccagtctggcagtttaacggggagaaaatacttcttcaaacgcaggttgtggttgttaaaaaacatgtcagtttccttcagaagcatatcagactggtattcacaaaatttgttgaaatcaatatatgggagtggacaatcttcatctcttatcattttgttatccatttttctgaaatttcttgttccaaactgctaacgctttattatattacttattcaattataattattggcttatctggtagatataactagggacatggaaggtcctggcgccctagctaattattattttgctgaaaatatcgtacagttatcaccgatttcagaattcttagtcgttaaaaattccttataattacattaactatgtcatatatggatatttacccatttacctcttttttccttttataaattggaaattaaaatacctttaatctttattgactttcaaaatttaaaattttgtaattttataaaaattatgatacattttgtgaaattttcaaagaatcttaaaacactattattaaaatatcgtctaaaatacaaagggctgttcttcgttttgaatcaaaaatatttcattaaaaatgaatctcaataatgacaatgaggttttggatgcatatgactataagctgaaaacatatttgatgacgaataatgaacttgcatcaattcggctgaaaattgtaacattgagaagagtgttacgtgaatatactaatggcaaaaactaataattgtattgagaaaaagttgctttatatctcaagtaaaaaagttcaaaagtttgtaattgattaattatatatgtgtagatctagagtgacaccacatgagttaacccaaacttttaaatcctcctgggttaccatttatcattttctcattttgtctgttatattttaaattaatttcaataattattttagtttaaatgtgtactatatctaaaaatttaagtatttgaacttatatcgaaaatttatcaatgtagtttctaataataagtttttatctttaattttcacttttacacctttaatattactattttaattttgttcttatgaaatttctctttaattttttgtttttgcttgaattaaacatcgtaaaatatatccaattcaataatttgtattaataatgtatttttatgacaatattattatggattttacaaatgccattccagtcatttaacagattccttacacattataaaataatatcacccgctactatgtaattctagagtaacatacaaattgacacattggcatgtaatttttagcttttaaattttttaaatgtcggaaacatcgaataagtattcacgcagcgatcggtcccgattttatgacgggtcagaaagaacaagttactttaccctgggatctagaagaaatttgatgaggggcttatcgcgcttgagtacaaatagaacttctttaagttctccagttagtattgaaaatgagcagcaatgccaagatatcctttgcaaacgaggcttctttaaaagaattttctacaataattttaacaatttattcaataaaagtttgtttcttactcatttaacttttccaatcagctactttatcacctctttatcacgaattttaattaaacaacattttttagatttaatgtattgcaacaataactgcaagaagtatgggacaatattgttgattctattttcagtaaatttgctcatactaattagtgttttcttaataaatgatcctgtaacttgtaaaaaggagctaactagttaccgagttggtatagagcattcaataatgatcgattccgaagactgtaacttaaataggaacgaaaaactaatcaactttgatgaaatttacgtttactacaaactgtttaactaccctttccacttttcaagcgtttataaactgttcagtaaggttcaagtctccggtaaaatctcacgtaatcacagtgatttacaatactgtaatacatacaccaaggttttgataaatggtattctttacactattcacttacccagttattccacgttattaatatattgcatctactattatattataggggttaatagaatactaaatccatgcggttcacacttggttaatgtgtataatgaccagttcaagttcttttcagtaaacgataaggaacctaacaaagctgtcaaagaaaacgaaattgaaatggatgaatcaagtcaagcactaacaaataatcaagagtaccagttcatcaaaaacatctcaaaggaagataaattaaatttcaagtattcatttcatatcattttacagatttctactgatctgtttagttagtataatccctatgcttgttagataataaaaatctttagtgattattattggctggatgacacactggagtattcaaatgactataaagttggactaaataaaaatcatgatttgataaatggatggaacaagggaaataagatatctgaacagcttaatacagaaaaatcaggttcaggtgtgagaaacggtcattttatacaatggcttacccctccccccttcccaacctttacaaaattgtacggaattttaaaaggacctctggaactaccccttaagctacagtttgacaacaactatgatgttacgctatatggtgggaagaagtttattattttaaaggcttcaagatttaacatgggacacctcatgacatttaggatcatgttctccatattcacagttctatccctcatttttgcactcacgctgttgctatataaacccaaaaacatgtacaatatatttaatcttttataatttcattatttgctataaattacgacggtccactacacaccgtaccgtattaaaatgtataactgatacacatggcacgtcaactaagggaaataaattagagtaatttatgggtaaaattaggaataaataaaaattaaaaaataacggaaaaaacggaagactagaagagtaggatgtctatggagttaagagttaggaatcacgaaatcttccatttataggctcaatcaaagttttttaaaatgtgaaaaaatatttggaatctaacattagaggaagatacaaacacatttgagaaaattggacttccacaggggctagcacagttttgcataaacggtaaagcatacgcgtgcacttgacgttgtattttatatgcaggtgatttctctgcttaaaaagtatatttaaactaattgtagtacaatttcataaaacaaaaattacgttttttacgacacaagtaaaaaacggataaagaaggccaaatgaaaattgttattaagactatgggatacttttaaactgttttaactttaactttcgtactgatttatatttaacttgatttatactttaacttgatttcttttgatttacacatattttaacttttaatgatctgatagaaaggattcttacacaatcggtgaatgatgacttggtaggatgaaaaaattaggacttaaaattagggcacaaaaggataaattaaatcctgtgcttggagctaactctgacccttcggaagagtatgattcgttccaacaaaatgtttttactcatcaaccaacccaactacacaaatctcatcattacactacacatcagaacaaaaccaaccaacacattgatgatttaaatttttataatggtaaaatcaaccagaagagtaaaattggcccagagaaggtagtaggtagaaccaggaatctggtagaaggtgaaccactatctaaggacgggaataaaggaaaatctaaacttaagtcgagaacaggatcaattttacctagaattttaaaatctttatcatttttagctgttttaggctcaattaattcattttcattggcaataaacgattcttttggacaacacacttctcaccgaacaccttttgaagtctcattaattcaaagcaacaacactttatcgcctattcataattctcaaactcgaaacccacattttcacaccactcacaacagttttagccctaacactgctgataatacttcattagtagaaaccaggagcagtgtgttaaacacaacacttggaagatttggatcatttttgcagtcaggattgataaccagcaaatcagaaaaaaagaaaaggactggtgcgaataggagagcccctaaggggaagaagggcaagggaggagaaaccgaggaaaagaggaacaaatggaccgaatttatggcaaagtttgatatcgctaaggtccatggttcaggagtttatgtagatttgggtgaatcggctactgtagggatttatgactacaggatgccgataggaaaatgtccagttgtaggtaaggcaatcatactggaaaatggagcggattttttgagcagcataacccatcatgaccccaaggagagagggttggggttccctgccacaaaggtcgcttcaaattcatcaaaacaagacatggagaaccagcttttatcaccaattagcgctcaggttctgaggagctggaactataaacatgagtctgatttaagtaactgcgcggagtactcgagaaacatagtcccgggcagtaatcgtaattcgaagtatcgttacccatttgtatacgatgagtctgagaagctttgttatattttatatagtcctatgcagtataatcagggcgtaaagtactgtgataaagactcggcagatgagggaaccagcagtctagcttgtatgtatccggataagagcaaggacgattcacacctcttttacggcacaagcggtcttcacatggactggcctgtagtttgccccgtttaccctattagagattcgatttttggatcttacgacgatgaaaaggatgaatgcgttccaattgacccaatatttgtggaagacgctgacgattatgaagaatgcgccaagataattttcgagtattctccaagtgatgtcgatatcagcaccaataaccagaagctttccgacgtagatctttacaaggaggcaatgaataatggaaagctcagcactgctctttcaattatgttcgctcctaggtactctgaggataggcccatttacactaaaggtgtcggtatcaattgggccacatactctgtcgaagaaaagaaatgtaacattctcgacgttgttcccacctgccttattataagtaacggctactacgcccttacaagccttagctcgcccaatgaagacgacgccatcaattacccctgcaatattgtacatggcaagggatttttaaagaaccctaacactggaaaaaagaaagaccagaagccacccgaacccccaaaggatgaaaaacagaataagaaggaggaagaatccaaacccaaagaaaaaggtaaaactgagcaaacgaataaaacacccgtttcttcaggaccattcataccatacacgagcttgaagaaggagggatttgagtgtagtaaatacgttattgagcgttcaaacaaaagctgcggagtttattacgaatgctcatcaacgcctatgttgtttgataagaaatcgagatcttatctgtacatcatattggcagtatcgcttgtagtactagccgtattggcctactttggatacaggtactacaataagcataatttgaaaaaacacaattcccagatatacgaagatgacaacgtaaacaattactacaatgatgacttcgatgacgaacacgatcgtgatgaatacggtgcaaatattagagaagatcaaatctggagcagacacaatccagatagatctgaagttacaccagtgagaatctctagacttaatcagtaaacctaatttctacccctatattacttttcatataccatatatagatgtgtatagtgtaatatgttaaagtgtgggtaaactatctgtttagtttaatgattttattgaatgaaatgtgtaaattctaattattccaaatatcaaaaatattttaatatttgtttacgtgaatggtattatcaacataaaaacggaagttattattattacgccaatatacctggaatcctatttacaccattaaagtaatatttatactctaatctaccactaagattcctatttatactgatattttatactacatattactttaggattaatagaaggttaaataacagccaaatattgagtaactctacagaatggcattttggtcaatttcctttgacaacattggataataactgtgatattaaaaaagttttacacatcggttatgacacttctttttttaagctttttttaaacaatttaccagaagtttcagggacatataacgtcatttattgtaacacatatgacactcttttcaacatatactacaactactctaagtaaattcaaatattaccaattttttaatttagaaaatataaaattgacataaattctaaattcgataacttgaggctactaagcgggaatcttcgtaaccttcaacacctattcaacacacaatttttcagatgtgtagttctttacatcaattccaaaaagtatttttttcacaataaaattcacattttttcttcagttcaaaggaaatattaaataaagaactaattgacagtttacataaaatattagaatcatcaggctatgtaataatagtaacaaaagatattaatgcaaacaaccaactcaacctattcttcaatgtatgacaactaaaaatttatttatctaaatatttattattaatttagattgactggatgagtgggatcttaggggataaatcaaatgataacgaggatatgagattatacgttagtattaaagagaaattgggaattttggataaaattatatttgttcattgctattataaattaaacaataataaaccaaatcagaacctgagcaaagtggtattcaccaaataattggtaccacataaaattgggtaatttttctcacttcctaacttttaatggtcaaatcagctaaatatttaataagtgaacaatgtgatttaattaattccgctaatggaaatacagataatgatataaataagggtacaaaacccgttcacaatatactgaaacaacaacttaatcttttaaattctaattccgatcctgatgttgaaatagaaacttttgtagaacccacagttagttcagtcagtaaaacagttaaaaagaagagtaagcctcccgccaaaagtaaaaatattaaaactgataaaaattttattgatttgctaactggtgataaaaatactaaagcacaaacagatacatcctttaagtatgccctaaatacattttatccacattttattcaactatttatacaatatcaccataggttaagcatagtatcgtagtgatatgtgtataaattcatgattagattgaaggaagagatctgcaaatctcatgttttgaagagtttaggaggttataaatttataagtgataatcaattcgacaattttgtagtttcgattttaccacaataatattttaatacacttaattttatgtcctttttatttactgtttattatttgtattatatttttttatttatattttatgaatttggatgatgagattgttgttgcccgtgaattggcatcaaacaatgataataaattcactgaacggattttccagcaaaacattcagaaatttcgaaatttactccaaacctccactccttatagcctttcagactttgaaaagtttttaaagaagttaactagttccagacttttcggaatcttggtcgatgataataatcaaagtaccttctaccactttattccacattctatactttatcttctattttatattaacataactatataattattgatattatgagtgaatttagaatacggtgttttaagggatgatgatttggttggaaagttgatgaaactgaaggatatcgactataaaattttttgtacaatagaaacggctggaaataaagggatatggactgcagatatacgtaaaattttgggattacatgtattttcctactaaaaaatactttagaatgacattatatagttatatataccatattatatcactaaaaattgatatgtgtagataaatcaagtacaaagaggagtaaaatatttgtacgaatcaaatagattaataaggccgattactgatgttaattacaagagcaggaagctgtttattttgtcgactttagaaccatccactcaagtaacgggtggttcattctacgacaacggcgaatttaatgagcttctggtagaaaaattacaggaacaaatttgctcattcctttctaataaccagggctctaatattcaagatattactacatttctcaaggaaacaaatattataagaggagtatcttcttacacatactaccagcaccactagttacactagttatacacacgcacttagtaaaataaagataacgtttatacaggaattgctggagactgatgtaaacagaataattaagttgttactactagagaacaagatattcaactctcccctagaaaataaccaattcatctacattgtaacttttgttatttaaacatctattcattcgattactatccaactaattgttagatatatcatttattaatgtattatagtggtgcggcgacaataacttgaagtttattgaagattgttttaatgttccttgttttggatgtaatatatcagattcgtgtaattttaatgatgaccatgttaaccccaaaaactgtaattacctaactcaatggttggattatgatcagatctgactgttgttttcaaagcttgtaatttggctgatttataaaaatgtatactatatattatcagtacccagttcaaccagagaattttgaatttgtggatggcttgaaggttggactggtagggatttgtttatcaattttaatttgggcgttgttttcccttttgaataagaggtaccagtttgggaaattcgtatttggttgtttaatcgcattttacttattaacattggcaaagatttggatttctgacgattttatcaataatttacactactttgttggaagactatggttcaaattcaggagggtattaatgtcagttgaggaaggattctatcgtttaaaaatgggatttaattacggtttaaggaatagattattatttaaagtggatagatttttcgacaatctagtggatgatgaaaatctgataagatatatatctgaagggtttgtgctcagtttcctttttttcgtattactaattttctacctaattacaaagtgtgcagatgaaagtcgctctctgattctgattattttcaaggattttttttccatttgtgttttatccgctttgttcttaatttatacacaaaattttaattctccattcactcactggaatctactcaaatacttctaaaactaaccttttaacactaatttacatgttaatatgtttatatatacaactttttactaaaaattactcttggtgtgacaccccccattatcaacattacatatttattacatttcttatttttctcaccttttaaaggtaccaacattttatttttatccttttttcatttgatagctacatagtattattaattacatgttaatagagcacaatatcttatagtgattctgctataatatttgttattatgattccttcccatattattatttcagatggctattaaggaaaagaaatcaaaggaagcagtcgccagggccgctatggccggtggtcgttccaaacgcaaggtataaatctactcacgatacctatttataataaacataatttaatattttttgttttagaaatgggttaaagtacgtgcaaaagataaattgaataattccgttttatttgacaagacagcgtatgataagctaatgaatgagattcctaagagtaaactgattacagtttccgtggtttcagaacgccttaaggtcaacggtagtctcgcaagacaagctttacgtgagttggagtcacttaacttaatcaaaccaatttgtgagccacatcacgcacaactattatacaccaaagtttaatctattactttacaaatcatttattacatttagttgtcagatctctcataaaacatatcaaaattattccagacctccacgtttttgtcatattggtccttagaaataacatgaattaactatataaccactgaaaagtgaactatattagtgaattaagtgtgtgctgatttagaaaaaacaactggttgtaatgttttaaatcaagtgctatatgcgatattatattctccctcgagtcactagtgttttcactgggagataatggtaaattccttggaggtggatagacgaagttaccaagtgtattggtggtgacttgtaccttgcgattatttaaattatttatcttcaaatgttcaataaagaattttatgttatcaactaactctttaacgccattttctattatagatattggaattcgtattttgcacatgttcttttgacttaattcagtaggatctaagtgagtactagttgataaaacctggttaaattcagattgtttaatcgtttcaatgtagtactgcaagaaattgttacttttgaccctcttaattccctcataaatattattacaaagcgtacctaaactcagatttgtaaatttaataaagaatactagaatataaccatattagtacataaataaatgaatgtataaaagtactagtatgatacccatgagtttatttggaagtaattttttggggccgagaattttggaatatttgagcaatttgggaaggtgtaagttgttgcaaatgataatcaaatcctccaactcagcggagttgttaattaccttgtccagatacgattcgctggtgtaagtcgcaccgcattgtaaagcgtaatcttcttcatccttatcacacatcacaaatatcttacgcctgtagttgttaggattcggtaaaatcaaattcccctttatagatatagtgtttatattcagatttaaatatatatttatgtatattatgccgtttttctggtttatttgtggattattaacagtatctgaggatgtgttattagactcagtattacacagtatgttgaagatgttataaatgttgtcaatattagtaggtaaaatattgttagtattttgcaaaaaggaaaaattttcggtaatttctaaattatcaactgaattcttatcatttttaacagtattagttggttttttggtggaatcattggttttaaccttttccttgtacactgatatatactttttgtatctcctgatatcattcactattctaggcaattttataaatttacttccatttttaaatattaataataacataataatatacttaaaattatacaataaatttggtagaaaatcagaaaagtttgtagggtgtagaatgtcactaataatagtattttttatattttaataatgccgaaacaaataatactgccattttaaaaaattattaatttgaaaatgctggaagatatgctctgtagatacgctatagtaagtcatttactattggcctgttctatcggtcatatctctactaccgttaacggattttacgatattattacgagatttttatcaaataaaacctgcctagcagtaagttctcatatatttttttaatttggctttattattattctatgaactccaaatgatgatttttttagattttgtacaattattgcttaatgttgtatatttactgttgtaaaataccaattttcatcttcctaggaactctaacacaactagaatctgaggtatcttcttttttactaactgatattagtttcagttacatcacctctatatatactactagtccgaaaacatgtatatacaggaattaattgagaatataaggaattatataatggacaccgttttgtttttaatactgagtaagcctagatttaacggtaaagaagtgttaatgtcggaccttgtcaagtgtatcaccttactcacctccttaaagtcatttcatatcatactgaacatacgtttatctcatgtaagttcgcaatatctaatgttactttagatgttcgaaattgatataccaaaatttatgaaaatcttccggatttgctcctttatttatgttttgagcctaattaactgcttcctgctcaacttatttttcataaatttaaataataaaaatactttcactctttgggttcttttcgaggtatttttaaagcagaattattatttagaattagttattcatctcagataaatgaataaatgtttaaaattgtgtagttactgggaatgttcataaatttgttattttcaacgttcaaattcattatcaacctctttgatttatatcagtcgaatggtaccgttcattagtttacagttgtgttatcgattttaagtacatataaatgaatattatatagggctcataaacaaaatgatcatactcttttatattgaattattgcatgacatattatcactgctaatattcaccgtaagtttttatgcttgaagattaattttcaggtttttatgatcgtcttcttcatcaacaaccctatcaacattccgatctacatgattatagatattattcatgtaagaattagataaacaggattttagaatatactttatattaactgtaatttgtcttaggtctcgaaaaacctattcaatcgtattaaaatgttaattgaatatcggaaaatttcaaaactactctacaccaagtaatcctatagatattttaccactaaatttatgtaactaacattggatttagatacaagtgtgcggatgatgagaagaatttgaactgtataatatgccgcgacgttatcacagtcaatagcagaaaactggagtgcgggcacgtgtttcatctgaactgcctaaaatcatggctcttccaacataacaactgtccaagctgcaggaaacttatttacaactcaagtattctattatacattcgtataaacaattataaatatataaacaattataaatatataaacaattataaatatgtaaaaaactaattgttatgttcagatgccataaccataaatatgagcatacaagtgctggacaacgttctgtataatatagaaatattcgtgttgaacaagatgaagtcgttggttaaaaaggcgtcgaagatgattaaaaatttgaaaacgaacctactacactacaacgtcacgttgaaaacaacgcaatcgagacatttggaatattatttgtacaatagtgtgactcacgagtttgtcaaattgtcaacctctacgaatgaaacgaatgataatttaagggagaatttaactgaagataaaaaagctccggatggaaacagtttgatgttaagaattggcatgatcaacgtaatgaagaagtactatttctcaaattactaccttattatgtgtaattccgacacagaaacggataacaccgcatcagacaattccagtggtgttgatggtagcgatggcactgctaataacttgccgaaggacaatgttcaggagctgttcagttggttaaatacggcaataatgacaagttcccgtgatgatttaaatgctctatataacaagttgttatatgttctctcgttcctctacctctcaacaaatttgttgacgaaacagtttttaactagttctcagagttcaaacgaaggtttggattctaacaattcggggtcaacatccaacaaaccctcgtatgagcctgaaataaaaaaattacacgtgaagaaattaattttaagtaaggattatcatttgttactgctgaagatgtgtaagaagaactaccattttaattttaaggccttttcaaataacatttcattattccaaaatattgttaatattgtttaaagtatttatattatacagtatatagattgtgatgtgtgttaaattgtataatatggagataatctaacatagtgtttgttatgtggttgatgttaataatttataatgcgacaatgtaataataatgattaataatttattataatagtatacaagtgtattatgtataatattgtaaagaaggatgaagaagagaaagttagataatattattgatgtggaattggtgactgaggaggatgtattgaaattagtaaaaaaatataagttagatttaaacaatcctaaatcgaaagcttcacaaaatttaaaagatattttggaagattttaaaacattattagaaaatctggttaaggataaattgctagaatcttacgacaccttcggtggatatcgctatgactatattctcaaaaacaacgttaatgtggattttctgctaaaattacaccagaaaaatgatttcgacaaagttttagaattttttaagaataaatttaaggatgatagtacaagctttgctcaatgtgttgaaaacgatttgggaataaagctgtttgttacgagaataataaacataaataacaatttattaaacagtgtgataattttatcattttacgataaaaaatcacagaaaactttgtataaaattaagctcttttttacaaatgtgaaatttggaaagaatagaaaagtcaatgtaaacgagtttattttagagaaatttgatcaaattaatcaagaatacccaaatatttcaaataccatagttttattcaagttgttatttttcaataaaatcaacctttcaactgattcatttgatggtgagtcggactatacatgtaacaatgatataaacggatacctaataaacctaattttaacgcatctgtgtactattaacaactactccaacaatattaaaacgattcttctgttcaccaatttacttaatttcttcaataatcatgacaaaattaacttgttttatttatcaaacttggataatactaagtctaatacgccggttacgagtaaacaatttagcgctcatactgaacaaagagaagccataatagatatacaagaagaggagtctaaaaggtattataacaatgaagtgaatatgtataataacaggttagtaatgaggatagagaaatacactgaattaaatttattacgtcatattgaactttcctatgacagactgaggcattttgtttctttaactcttaatgttttaaattctgctgctttaaccaaggatgaaaaattaaataagctgtttttaaggcgtccgctgctgtgtaatttttatgaccattttctttctttcaagtgtaattcgactcaaatagtagatttcactaatcagctaagatttctgttaaattatggtttaaattataatctaacactgttgcacagttttatacttagtcccacagcatgtattactgataagggtgaggaaagtgacggaaccgatggaattagtgtattatactttgtagtaaatgagaatggagaaatgaacagcaggatagatttgactgaagaggttgggaaattatcattttttcaacattttttcaataataactataaactcattaagtccaacaatatattatcgtatcttaccctatttgaaaatgttatggagaatggtggtgggaaagaggaaaagttgtttagttatagaagcaacataattaaagaacttttggggtttatagtgaaaaagttgaaaataaaagtaaatttgaataccaacaacttgaatataaagtatcctctaattactgaaactcaaaagaacttgatagttaacactaacaaccttgttgacattattatgtcgttgcaattgccaattaatgtactcaatatataccccctcagtgattcctattcgtatctgaacttgtatgacataccggatactgacacatttgataaaaactctttggataacagtataatcctgctgataaaatggggaaatgacccgaatttaagaaaccccaaaacagctagttatatcaatacagcactccttgcatacctgatcagtcttcttaaacgtcactatcatattcaataccaaatcttgggagggggcaaatctactaaaactactaagttagcaaacagttcagttaatagtaagaataattacacacctgagaatttagagtattacatagagtttggaggatatgtatataaactgatgatatacagagaagacagtgaggcttacgaagagtatatacttaatgaaaggtgtaaaagtgtaataatgagggacaaaagctttataaactgcataaaattgactaagatcttctttgcaaagtatttgaaaattgataataactctgtggttaaaaggctagtattggagtattacgaggagaatgagagtgtgagttcattcacagcattcaaacaaataatatggaatcttgataaagataagcataacttcaatagtcagcaaatcaaacagtgtaaatcattattaaatcatttgaatagacaattattaccgagtggagaaaatttggaaaactcggcaaattcaagggataaacactccaatattgttgaaaatcagctgtctaaacagaagttcgatcttagcataagaataaaagcaggagaaaatgtaaaacaaggaataagttttgttagatctttggacatatttgaggtgtattattacaagtacgaagtgtccaaccagttccagagaaaatactttaaaatatatttaaacctcaaaataaagaaattcgtgcctagatcgtacattaagccgagtaattatgtacagcaaatggtagtctgtgacaaccacatcagggatggggataatatgctgataaaatcaaagaaattacaaaatcccccagccttctttattattcctaatattgtacttttagtaaaattattgtctcattgttttaacagctttaacattaattttctgtttcagtgatcttacacattgaaatctatgtaacattggtgtaacatatatatgtaattatagcatctttctgtcttcatttaatgagaatgaacaatattaaagctgtagtagtaacgggttgcgatagtgggatcggatatgggatttgttccgccttattaaggaaaaattactttgtaatcgcaggatgttatactaaacaagggattaaaaaggttaaaaagctgtacaaatcagtatttagttctggagatgtatcttcatacccttccaatagatctgattcaaccaaagattccatggatatcgtgaataaccacgaatctgacaatcttgatcatattattggtcaaaagaaagatgatactgggaatcttaatgaacacttaaactcaattaatactaagaggaacgtgtatagaatgggtaatcgaggaatgataatgagattggatgtgactagtgaggaatccgttaaggaattgtcatctttagtcaaagaattaatcgatactaaacaaatcccaagcctttattctctaattaacaattcaggaatttggagattctcatcactcaaagttatttttacacatttatacttacacactaaccatatactattaactaaataccactaactatatattactattatttataattaatataggaatgctggaatggtgataagttgattgaaagtgaggtagaggaggaattagaacgttggaagttggtgatggaaacaaatctgatgggctcagttcgagtttcacttcgattgcttccatttttggctagatatgaaggctttgccagaataattttcatcacaagtgttgtggatgagactggagttcctggtcagagttcgtatgtttcttcaaagttcgcacttcgaggattccacgaatctctaatgcatgagttggaaggaactaacatcgccactgtaaccgttgcaccaggcgccctatcagatacctgcctcttcgattacgactttaagttgaataaggagtataggctcaacgatacacataggttgaagaatggaatgagtaccttattagtcatatagctaacactagtaataacaaattactctatattcaaattaacactattaaatctaaaactactccatatttaaattaaatgagtagagattttgaagaaattggggtcaagtagtaaaggagttgtaaaaacagtactgaaggcactggagagtaagagaccaaggagatattacagaagcacatcgggaacatttctgttcaaactgatgaaattgttcccaaaatcgctttacattaagatcgctaaacttattttactcaactttgaacacatctacacctcacttcccctcctcactaaactgatacgactcgttcttaaataagttaatgtagtatatactcagtgatcaatgagtaaaaagaataaatagagcaggatttacagtatataattaacacatgcatatggaatgtagcatacaaggctaaaaaatcacttcttaaggtttaaatcagttcttggcggcaataaaccattttctcttgcgattttaatttgctcgatatatttagcacgttcaacctgaaaaggaaaattaagttaaaaaaatttacttcgagtttcgcgtgatgataccgaagcaaaatcatcgactgtcgccaattatacacaaaagttactcctaacattcaatatacacatataggtggaataaataggaataaaagagcatgttgtattcttaacgaaataattagcaaaaagcgtatatatgagaggaaatgtgagattcatgccagatagtaaatatagtaaatatagaagtacctaagtatatagtggtgccgatcaacacagaacaaactccaaatgaaaggtaatcgtaaattttattttttttaacatggaatccataataatttatgcctaaagccttaaatagttcgaatctgggcccactacccattttacagaatccactcaataaatcacaaattcaccatttaaatccactcaatatatattcaactattataaattcacgataactgacgattttctcacgaaaatttgcagtatctaaaaaataatgcaaaggtatggggaatggcgagagaatattagagttagttcagaataattttaaacaaattatatcatatatttcaaataatttcataatttgaaatggaacccactttgtccactcatattttaatctaaactaacttctccttcttaaccaccccttattttctgccggaacatttgatcaagatacacttcatttctcactttttttcgaatctgaacattttaaataaaatttcacaatttttcattacattcaccaatttctaaatgaattttaatactttgttaaattggtaattccatccaataattttaaaatattttaaacctgtaaaatagtagtaaaattgggtaaaaagtaaagataacatttatcaaatttttaaaataattttaaagtaaaatagttggtaaaaaatgctgaatcgccgtcctaaattagaagatctgactgacatatccacagaatgcatagctttagcaaagcagcatctggaagtgataaagtcactcacagacgtaaagtcaatgtacattcactgctaccagctgatgaagctgggaggccttgaggcagaggttcctcgactggtggtattcggccagcagtcgatgggtaaaaccaccctcctcgacttcattatgggaggaccaataggctactcaagtactgatacaggcaccaagcagccagtatcaatcatcatgaagccactcacaacactaaacagtattaagcagtcactcctagaaggtaagaacatatttatacatataaagattaagatttgcattaaacatactagttatatattttactgaaatggccataaaatgttgtagaaaaacaaggaggaaaggataaaggtgccaaattgggatataaggactcaaccgatggatctaatgactcactgagctctgaagctatgttaatggatgtaaaactgggtaaaaccggtgaagaaatcctgttaaatgaggcaaactcgatagtttgcagatttaatggacgtttcatgacaattcacgaggttcaagacgcaatgagagtccatatgcaatcgctaggtcagacaatattatccgacgaactggaagttgaagtgtatgtgccaaatgcactctacgccatcttcgttgatctcccaggtattaaagatgactcgaaagtaggagctgaactgaccagaaacgttgtgaggaactatgtctcaaataacccaaatgacctttacattctagtgaaaaaggccagtgatgatcctagtaactggccatggtcgttgaaggagtttataacatcatctgcaccagcaggactgggcctaactccacaacagacaatggtcgtaggtaccagagcaaaggaattcttgattaacgagaaaacagatatcaaaacccacgaagaactggttgaaagagtatataaaagaggagtaattgattctaaaggccaaatgctccccttgcacctccttgaattgttctccctatcaatccaggcaaaagagagtggcgatttccttagcaacagagatgagatgaaggcacaaatttcatcatcccaacgccaaatatacgaccttctgataaactctttcaatggagcatcacttaatactgaagaggcaaaccgtctacgcgatgagctctttaacattttcagcattgactctttcttgaaaacactaaattacaagttccagcacctaatgaacaaccaacttaataacctggaacgcagactagtgagaaagaagatagagttagagagacaaatcgcagtcatggaagggaaactgaacaggttttcaccccaaacactcagagaaagcattaaacagtttatacgccagttgatagaagtggtgcacaacatgataacaggtaactacacaataatgaagttgccaatacctgctgaacagttccttaaaaactacggaggtaatttgcaagataacctgcaagacggacatgaattggccttgaacttgttcccaatgcctgagatgtatgaccctgagttctacgccaagataaccaagcgcacagaaatactgtacaaaaagaagttgacaatgatggactccattaaaccgggtcgttacgtacgttacttcacctctaaaatcaattcacacatgtttggcctcatagagccaccatcacgaactaacctcagcacctcaactactagcaatagtgacataacatttgacctcctcaacaaagaatactcgtcagatgaatcaattaacgttgagtttatccaaataaacaacggagtcgaaacaagtttgcacaagaatattgaccgtaacaagcttgtgcttctaacaccactaccaagtgtatccttggaaaggttgcaagtcccactgtatgcctggcataagacccaagcatcaacaggttgggttctggtgagaccaatagtgattgatagacttccgccagaaatactcatccagaagtcaaattaccgcgaagttgatatcgccaataaacagatctcattcagatacctggacgattcaggtgcacccaccggcccctcaggatacccatccgacaatcttaactcgtacggcgatagtgtgaacactggtacggcacaacactccaactcagttgaatataacatggaaaccagtgctatggacaagaaggacgagaagaagtacaagaccaaacttgataaaatggaccgcatggataagtttgacaagattgaccgtggctcctcagataagtctgacaagtccactgaaaagttggacaaatcagttgataagccagacagaacgaccaatgaccgttacttgtactttacaaactgcagtgaaatatacctcgaggacagaacttcaatgccctattacaatagcgcgctggagatggtcagtggagaacatgcagatagtaatttgctgaaccagctggccttcactaacatcagtcactggctcaagttccacattaagcacatggagccagaacatgtatataccagtggagttttgtaccaaatgttgagaagtattcatcacgttgtggatagggctgactgggaaccactggttgccgatttagtccagagtaacgtaagaggcaccttacttcacgcttcaagactcagtgcttgtgcttgtgcagcagcactgagacgtgttctcagagcctcactagaagaagtgttccgctgcatcagaattaacgacctcgaccactcgttgttgggcctgtcggaaagtcttcacttccaagaacaaattgaccaattgtcagaggagttctgcagacagaaggcgcttgagtgcagcaatgacatgaaaaacttgatccttgaacagacctattcaatccagttcgacgtggcagttgacatctttgacagctgcaacgagtttgagaagtacttcatcaacacgaacaagtacagaggccacatgcaggagtttttgaataacgttaaggagaacatggccattaggaagaggagactggcaatgaacgatttatttgaaaagggagacaccaagaactccatcgagttgatttatgaggaggtcaaggtccagttctgggccaccaagatgctcctctcatctccacttacctccaagctttactcccactttatcaaaaacgttcttgagcgtaaacaggtgataaatgaggaccctgcaattaaactcgaggccgagtttgaggagtttctgcagagcaatatcttgtacgagctggtcgacggtaacttggtgcccaagaataacgcaaagttgtccaacgactatgacttgaatgtcaagttcgacaggtttgtcgaaaagtacaacaaaaccaagagaattttggaatacgtaacatacgcccttgagggaattaccaaattcaaacatcatgcacacaatgaagaggttgttaacttcctatcacacctcaccctgtaatatattatactatattatatttgtatgtatcattttatactatatttcacttcactgtattattgtgtatattcatattagtacattatagtataactttattactagtatattggtatactacacattacaaaccactacataaattatatattcattggtgtattatatatttgggtatgtataaaaaattaaaggaatgattttgaaaaggtaacgaatgtgtgaacgtcatttggacacacacgatcaactttgtattcaaaatacaactttacattatctttgttatcaaatggctcagttgagtaagttaataccttaactccattagcatgcatttccttaacaaacctctctagagccatttctctcttttcctcaaggcctaaaaccgggagttcatttaaccagaacgagtctgcaacgtttacagacgaagccttgtacttcttaacaaactctaatactctaggcaccgaaggtaatgaggataccgtatcaaataacaaagctaaaggaacatttaagtggttaccaacaagagggagaagtaggtcagctggtgatttgttgggattattttcattctcattatggtaaaatttagagcttggatttagcggcggcgggatccacatgaaagaggagatgaacacatccaaatgtctatacttctcaagaagttttaaaacctcttcagataactgtacctttgtacctttaagttcaaggttatattttaccttggaaccgaatttattgaaaacatcttccaaggttggaaggcgctcataatcagtgccgttaacaggtttgtatcctttagcttcttgcaaatacttttgtagcaaatcacgcttttcagattcactcagtttctttgagtattcagaaacggaatctcgagaattaaggcctggaagagtccagggagctttgagcacaacattcaggtgtgaaacagtgagattctgaacagaaagatctggagggaatgttgataatttaccattttcatataataaaaggttcagacaggctgcaccgtagggttccataccgtgacaaacgacgacttcgccataatcagttaagaaaagatcaaactcaaaaccgtcagcacccgcctccaaagccttttcaaaagctgataaactgttttcagggtatgaggcgaaggttaaaactgtgctacagcccatgccacgatgtccatacacttcagtccttaccatgttgatttcagataaacaagtgtttttaaaattttatcttatttttaaattgtggtttatttggagagaagggagattgattggaaattaagggtctaaaaaatgaaatttacggttatttatgacgaaagaaagtaaattctgggtataacagacaataatattgattaagaaagaagtaaaggtagaaacaaaaattaaattttagttataactcgacataggagtaaaagagtgttaaaaagagaagacaaataaattataaataaaataacaccaaaaatagtttgattgtgtaaatagatagatttggaatttgcaccagatatgtgtaccacaaaatataaaatctagaccctagaccttatatttttatattttttacatattttttaggaattcatattttttacagtcctaggtactaattttgtacccatttttcttcaattttacaatattatttcgttcttacctcttttttgttccaactgttttattatattacattaaatgcggttatattattaaacttcctctacaacattgtattcaagtgtaaatcttttcttaattttttatttatctgtaatttaggctgatgtattttttgcctttttattacgaattaaaaggatattattgtattttacgtgtaatttttagttttaaaatagtttttgtatcctttttattttgtaaaaatgctatatcctgtgattttcatacaactccactcaattaaccaattgtaactctagtttatgaaaaataaaatacaaagctaatttgactaaaattaagttaaaataacaaaatagtaaattaaaataaagcctgtattctaatgatatcgtgtatatttatagcaacgtctacagggaaggtgttggccctgaggttgtacaggggcgatgtgaccaaggaggacgctctaatattttgcaggaatgtgttgtctaataaccgaaatacatatgctccgatgtacaggtacgaaaagtttaatttcttccgggtaaacatcgaagggttcaacctggtcgcgttgacgcgccgaaatggcaactccttcctaatattccataccctcacggagttaaagaaactgttgttatctttcttatcgggagttgtgactgaggagaacattgtggaaaattcatttttgttatacgaactgttcgatgaggtgattgacggtggctatacccagaatttagagcctctggtgctaactgacgtcatggccacaaaggcaacagtcaagggatctttggccgatcccagcaagtacggcaactactttcttggatttctcccaaagtttggagtttcgccggaaactttcttgtttgagcaccttttaccgtttgagggaagactgaatgactctgaagagtgtttagaatactgtcaggaagtggtctcgatgatggccacctcagtgattccaccctggcgaaaactaaacggggtttcaaacaggaactcaatcagcgtagaactgactgagaacctgaacgtattatataatcataattctgagttagtaagttatgaagttacgggcagtatagtggtaaattcaatgttaattggaactccattggtacatttaaggatgaatgatgatttttcacacaatcttactaataacttaaattcaagctcatcatatcaaacaaataaaagtaagatcacagtaattataaatagttatttaccataagatagtgtatttactttgttctaggtagtagccagttccatttaccagtggcagccaagcaaacggttcgtctggatgattacaagttccaccagtgtgtgaatttagagagcattaaaagtaataaaactattacttttataccaccagagggtatgttcgtacttctgtgttataggagtaccagtagcgcaactattccatttatactccgacctaaggttaagctcattgatactcttcatatcaattactcaatatcactatcaccaacgttttcgaaggctattattgcacagaaggtgtgcgtcaagattccaattccaaagacaactaaggagatagtttcaggaacaatcagtacaggaacaacaatggatgttaacctgtcacatcactttgtaacttggaattttagaaagttgcagggtgaaacgacttttctactgacttttaccgccgctctaacaactgataggttcgggaactctcttcaatcgctaccctcaatatcgctaggctttcatattccctggttcagtgcctcagggctatacctgtcgtctctagacctctcgaacaccaagagcaaggtgtcaaaaaacatcaattatgtaaccaaaggtggattatacctacatcgcttgaaactactataattttttcaattatagaatattatgtaatcagttttatgatgtgtaaggtatacattcaagatacattgtggaataacatttattagctgaatggtgtaagaaatagtaaaaaaacggcgatttaaaggggaaataaatattttaaagatattttcttttattattttggaatccatttccccacacctctctttaatttaaaattctatattattgtgatttatccacaataaaagtataatatcacttaatcagaatatatagatataatatatctacacgaaagctataattagcaatccatctctgataatctaatgtaaaatagaacacaattgtttgtaaatcttaacacagtaattattagaacaagaaaatatcattgtgtaaaatagctaataaaatgaatatcaaagtagtataaagaaaggtataaatgagagttcgaagaggaggtagttctccaaatcgtaagattcgtaaaaaaaataacaaaagtaaccttattacccttacactaattattgtatttattatttataaatttattaatattatgttttagttaaggatggaagaatcgattcacttaaaccaaacactctttatttagtccacattaaatacgactataccaacggttcaagggaagctgtatctagttctctagataacaaagtaattagttcttctaattccggtttgtcaaatgaaattctaaatcttgacagtccagaacaagaccaagaaaatgaagtccaattacaggagaaattggacgaacttcagtcaaaactggaagaattcctggataattctgaagaagataactatgaaaaagtagaagataaggctgaaaataccctgttggatgaggaggtaatgactgacatagttaacaataatgtgataaactttaaatcccaaatgtgttttgtgtgtatggaaaaccattccttaacctataatatggcctataatttccagactgacaagtacatttcaaaggatgacccattatatgtttcatacgtcaagagtaacattttcctcaaaaacgacgactctttgaagttcgacaaggattccattttcgatgcatcctgggaagccgaagccaaccacctatgcagccagataataaaattcgttaactccacctcaccttataatcctttatcaaagtcagctaaaactagtgataaatcatcactgagtgattctgcatcaaaaccaaaccaaggaaatgatggattagatcaaaacaaatttgaaaattcagtttttgaggaaaagattgctcataattcactttcaggtatttatttaacaatgtgttaatattaattcagataaaaattattctccaaacaggaacgacataagggtaatcgacgcctttagtgggattggaggtaatttgatccctttcataaacaacttcaactactccttgggtgttgagttgaacaagaaacgggtggaaatttgtaaagataacatcttatcttacggtgttaagaacccatacgacctcattcacgacgattttttcaatttcgccacggagtttttaaacaacccaaagttgttctttgaaaaattgggcaaaaagtacctgtacagaaagaactcaccctttcaattcgactggattcacctatcgcccccttggggcggtgtaaactacaaagggagctccaactacgatatctacaagatttccacctgctttccaaatgtttcacaactaattgaactttgcagtaagttggcacccaatataactctctacttgccaagatcacaatcactctctgacctccttaaaacctgttctcgacatgattacaggttcattctcattgattcatacctcattcctccagtttataataagatcagggtattttcttacttacggtttctagttttaccaatttatatctatttactatttatacaatcactcacatttataaattaatttatagtgttgtatgatacacctgattaaagattatggcatgtttaaatccaatgctaaggtgaaaaatgtcaagaagatgggcactaagcttctatttgccaagataaaggaaagggctaaagatgacaattacaatgtcattacaataaacggatatattaacgagttaaacattgataacttgatatcaattgggctttcaacggtgttaaatgaaaccagtacaaatgtgtacaataaactaaggttactaatcgcctccttcaacatcaacactctcattaatctcatcaacgtttcaattcagatatactattctgaaggtattttcattaaatttaccatacttagtttatatacacgatttaaattatacacacattatttacacaatatacactatacacgttatttacacaatacacattatatacgctatgtttacacaatataaattgtaaaattgttatttttttgcaggactggttaagatggatggaaataagagaacaattggcgggattttcttttatttgctcaaggtttactacaaccagctctataaacacattgaaaaaaataataaaaaataataaacttaatattatagaatacacactatctactcatgcgtggcttatagaaaattagtggtagtagtagaacatgaagatgatgagcaggacgaagaaaatcagcctgttgttctggttgttaacctcgaagttggtcagtgttgtgttctggctcccatggctgaccttgtacctgtcaagttccttggctatgacttctgtcgcctgtgccatcttcgtgttcgcctcattcctgatcatcttttcaaacaccatcttcttgttaaacaccacgtccgcatatatctttatgttcaactcgctcttcctgttcacgctttcatacgggtcttgatttctttgggtctggctgttattcgcttgactactggtctcattatctttttgttgcttatctttctcagggttactacaatcttcatctgggcttacattgttttctaggttcgggcttacatttgggtttacatttgggtttacatttctgttttggtctgggtttccactaacgttttgattgaacgtttcattagggttttgatgtttgtcctcattaagttgaatctggataccattaatctccattctcgggttcccactgtcgtctttactctgtttgtcactctctggatctagttcctctgaattctcactacttaggtcagtagaattctcctgtttattgatgggattagtggttctaggtgcactggagttggaaatgacggagttgaggttgtcaagagagtaatcagtaggggtaatggaagtggcgataatagtgtaaacagtgtagaagaatttagtgaaaggagagttactgatggtagtcacagactgataaatggtaacatcgttgaagaaaacgtaacataaattctcacaagtggttatcttcttgttgaaaaacttagaattggtgttcttaagtgtgtaattcatgttagtcctagcacaaaggcccttcattatgtctccattcctcatctttacgctgacaacgttatcttcattatcatcctgagtctcatccagagcgttaatcttttgaagatttgacttgatggaagtgatgattgaagaagggttaataaagctgctgttggaagtttggccttcagtgaagccgagagcttccttggacatagaaacaaaggaatttttattactgtgatttaggacaagattatagaactggaacaagtccatgttcacgttacagttgtacaccaaagtcttggtattgtaaagtatattgtaattattcacaatgtaattcaccaagtattcagcactgatagcgttgttcaatctcaaatttccaccaacactattattcttgtaatggtttatgtagtgtaatattgtttccatattcgtatccagaatcataaaggtataaattttagtatttacacctagggagtcattctcgggtgaatttgcataaacacaaagcttattactgtcaatgctaaaatcagtgatatccacgaaagggatagtacgaaagttgttcttgctcaggaaaaatctgcgttggaagagtgagtgaaagcccaatttatctctagtgatgtaaagcactccggggacttggggaactcccaataacacacaacttaccctaagaacaacagggccactcagctttagtctcgacattacgtaatcttccatcttatcattgggtattatcaactcactgcctcctgtatggagacaaatgtacttgtctgactttattatcacgtgtgacaggtcctctccacacattttcccatcacaggactcaatgctattttccctatttactcttctagcactaattccttgttctgaggaatttgaacccacactggtgtagtagttcgacccatacagtaacgctattatgtacaaattattgatgtataataatatgttatcgtcaaagctttcaaactgtttactcctgagtgtacttattgatctactgtaggtctggagctgcgggtttgaactcacggtgttatcggggctgatactgctgattgtgtgcaatatatggtttatgttatctccaatgtatttctttatatcatcaactatgtcagaattttcagaatctgaggcttcaagtgattttgaggtaaattctatcatattacatgcgtatgacagatattcgttggagtaatcattcacacctgacaaagagttgataatgctcttactcaattttttacacaacttaccattcaattgcctcagaacaatcctataattctccttacccggtggttcagttgtttcactcttattagaaccttcagacacattatcctcgttgtggttatcgggtttagtagtacctgaggaatcaccggagtttgtagttgcgtcttccgaggtatcatcagtgttaatgggacatcttgaagggcttgaatcaccaaaagttgttccaagatcactaaaatgtggagttaactgtcttttagtaattctttcctccatttcaacgggaccgttttgattcagttccgtattacactcgactatcggagagtttggcgtatcactattatctgagtcatcaacattaatactgttaacactatcaatattcgattcactagtgttgacaacaatgtcagtgttagagttagtggtatcaacaacactatcaatagtgttggtagtattagtaatactcgaattattggtggtgttaacagtgttaattgagttaatgttaatttggtgaggggggacagaatcagaaatttgtgacattagaaagtaataaatgttgtatttggagtagtggaacttgttaactctgtcgacaatgtcatagttgacgttgttaacattatcaaaaaagtaggccttaaagttaactacatccctgttgaactggttaatagactctatcagttcattcttcattttataacactttactaataggtttatataattattgtacttttggcgcgttttgacttcatttaatgtcattctacttagtttattgcacttcatatacacggtactcgcatcgatctcattgcccttcaaatactcatacaatggaaggtacttagtattatccatgccactcttcacacaattatcaccaggtgtgtcagaaattgggttagaattagtggcaacattgttaagcagagattgtttgaataaactacaatttttaagtttgtttaagaaaatctcatcattaaggacttcttcattgatataattcttgaattttggtatcgtacactgagttgcgccatttaactggtttatagcgctgataataatctcctgcagagcattttcatagttacttaactgtttgagtaagttctgatacttcctgtatttctgaattatcctgcttttgttgagtttcttgctaacaaatgacttagactgcgttgaaagggttactaggtatttatactggattagtaaatatttgaacaaatctctgtaattttgattatttttaacttctgttgaaaatattagtgagtttttgtgttcagatcctttattttcgctgttgtcctcattttcaataaccttgtcatatttgttaatttggtcatttaaactatactgattggaatcttcgattttattacgtgaatttgataaatgattttgtcgagaatattttaacacggttttgttaagttttaacaagttttttaaaataatgacatttttgctactttcgctgatcaccggttcaaattcgattttttccaaatttgaatccacatctaatttacaaaacattttatggtacatttctcatctttacaaataatttgcactctgaatattattaatatattacaaaaatccaaggggtttcagttcaaaccccttttgacaacacatttaacaaataaagaaaaaaattgagctatggtacatttgtaagttattttttaaaattattataaaaatgtgtattaaaattgaaaataaatagtgtttaatcttttgtcagcactataccactattatagtatttatatcccttattttttaattaaattacgcaccattttggtcatatttctgggcatattattagattcctacaccgtaattaaaggcttttgtactcaaaagtacaaatctcatctgctccttttgacaatgcttttgatcaaaaatctctcccttttcccctcatgccagctgagattttacaataaattaatttattttaaaaaaaactatgcaaaatattccgtaaattttagttttggtacttcccgtagcacctcccctaaccctgacaacacatcacacactagggctaagaatgaagataaaacaactaatactaggaccactaagcgcaaatcaaaaaacaataatttaagtagtattaaagtaggtggaaatgatctaaaaggtgttggagtggagtataacaaactctattacgagtgtatgaacgaaatatacgatagaaggtttgaaattcacaatattaaagagtccaagactatccaagatttaacaaaacaggaatatgacatacttaacaaagtttttaatagggtaaataacgcctcaatgttttctaaatctacttctaacacaccaaatccttcagtgaagagcaaacagtatggtaacacaggtaataatatcatgagtataaaaattgatgtaggaataagtccttattgggacccatttaagaatatcaagaatttaaaattacaaatcatttcagaatataaccaattaaaaaggtaaacaacactcaatcattgtaaaaacatttttttagattagttgataatgtaaaactgtataaatttaaacaagcagttaattctctctcatcctctgggataaactttggacatactgatgcgtcagataataaagttaacgaagatagtgagagtatgtatataaagaacgagaacttttgggatcccgatcgtaataaacggttaattttaaataacaataataaacccttttcatttcacggtaactttatactaattatattaattctataatggttgtatagttagtaataatgttaaaaaaaatttagatttacatgtattacacaattttataagtcaagatggccagatattaccgagaaggataaatatgacaacacgcaaacaacaaatacagatttttaaggctattaaaatcgcaagaaacttggcactcttcccatataacaataaaccctcatatcataatcaaattccactcatcaatcccatagaagtaccttacacatttttacatatctttcatagctttataaattgttaatttatttctttagtatatgtacaatgagctgttttacaaatataagaatgaaaatgacttgagatgtaaaacgatgatacaaattttacagaacaaatacccaaatattaactatcacaagtaatttttacccctatatagtttaaactataacatacaaataacacagtcaataatattgttaaatagatgaaaaattatattaaaaaatggtgtatattttgtacaggtatttgaaatatgagtttactaggaatacccaatttccctacaaaaatgagagctaaatggaaaaaaataaaataaatttaatgtctattcattgaattatcatccgttctaattaatttccataaattatttatttatgttttacactataaagtttgtgtgattcatcacatttgctcctttttacatccaattcacttttatttgtgctattttgattacttttttgtagaagtttaaaaaaattataaattttcatttttccaactgtaatgtgtatgatttcccgaaacttaccctaatgtgtatccaatactattatgtataataatagtattttttgtatatggtaccataaattgtaataattaattccaacctctaattattaattgtaacatgtaaaatatatcctaatgtatgaaaaatcggttaatgctaatatttaatgtttaccctttacgtcttgtaccataaatgattataatgtgaataataatggaaaaggatcatgtatcgaaatgtatctcagaaattgaaaactacttgaaatcaacaaacgctaacgagaacattctaaactcatttaacaccctgaaaaacttgattattaactctaaacttaaccttagtgtcgttaaactcttactttcaaagttaaataactcttcttctaacttacaaccgattaaccctagtatatttaatccggaatcaagtaataacgagacgatgactccagagaatcgaggctggaccattggaaagagtagaagaaagaaaaaactgaatagcgagaacgaatatattcaacaaattggcttaaactggcacttggatttgatagaactttcaaactatccaacggttctagaaacaggcccaattgtggttgtaggaaagcatcttcttcactgcgtagggaatctcattcaccccaatttcaacactaacttaatacctgtacttcaaaatctacaacaacactacctagccaatccctaccacaacgctctacacgccgccacagtatacacacttatatacataaatttttatatactcaaacatctatatactcagtcatttacttaattatatagttaatggaattatatattaataatttgtaggtagggcatatgagtaaattattatcgaatatagtgactacaaagcgtagattgaatccttatgaggagtttgcgttcataatatcatcgctagcgcacgacgtcggtcatccaggtatttgctcacacttaaatcacatttaggtaaaactaataattatctctcaaacacaagtaatgtgttatcgctgatttacaacgataacagcactttggaaaactaccactgctcacttctgttttacattattaaaaacaataccaacttctactctataatccccaaggacatttggccatcactccgcaagagaattattcaactcattctttccactgatatgatcaaccattttctacatatcgacaacgtcaaggttttctatcccttaaacataaaattaatcactttaaacaaataactaacttatataagttattctcacaaatgttcccaaatattcacagattattttcaaattgttcaatatggctgaatatttttataggaaaagaggcttcaaggaaagtttgatattaaaaatgatgacgatttttggcttttattagtgctatgcataaaggcggctgatataggacataatttcctaccctgggcagaccatttaccctggacccaagtactctttgaagagttttacaaacaaggagatgaagaaaaaatgcagtcaatttctccacttatgttctttgatcggaatgaatctcgcaacatacccattcttcaactacaattcttcaataccatgacacaggtaattatacacactaatacacatttaacactaatatacttagttattactaatatacatctatatacactaatacacatttattactaatacacatttaacactagtatacttagttattactaatatacatttattactaatacacatttattactaatatacttagttattaattttatcacagccgttgttgagtgaattgaattattttgatgagaataactttataaatgatatattatcgaagaattcgaacgataatgccaataattggaaaaaatatgaaaataaatctatacatgacatcttacttgaattagaaaacagtaacttgaaccaagatattcctgacgccttcattaacaattcataatattgtatcatactatatacacatacgagtatattaaacaatatacaaacagggtagatatcaaaaatagactgaatgccttttatcattttgaaaacaactttctctcaaattttgttttattttcttcagaattattttctgaatattttcagtattggtatttcggaattaacattaatatcaattcaaccatttgttctatcttaacattttttcggccccctaattaacaacatcagaattagctcgcctatcttcttgaatactcccattattgtaatatacagtattaaagtctggatagttctttaagttatttatatcattggtcttcataaaattaatattaaatttcctaatttattaaactagaattgaaaacattaatttagatccaatcatcttaatttttatacataacataacatattttccggttatcaaatttaaccttcagaattaattatattcatacaatttatttaaaactaattttaatataacttaattttagtaatttatttacatcacacaatcattaattgtagatcttagatccatgtactctaaccactatcttaatttcacagaacattaccaacttaagatgttatagaataaattatcaaaaatatacgtgtataataatatatatgacattatgtatactgtgattttatttaaaatacattaaatttaggaagttaatatcttcttttggactctaactttttagttccagacgaggagccgtcgttaatatattcccttgttgttacatttcccctgccgtcatcctccttctcaataacttttttatatacagttcctaaaaatattattaattaggtattatagtaccgtcagcgttttgttgcgttatttcagttttggttattattttattgttgaccactctcgtggttgtactggtgcttgtgctggtgaatcctccaccgttactaaacgacgaactactgaagattgcgtttgaaaatccactggtagcaaaagatgttgaaaatccattacaaaagtcatctaaaaccaatttgttttacatatgttagggatacaagtgatagaattgtatcaaagagtaaataattaatgggattgaaatagtttaccttgaaagaattcatgatgtccagtgtttccgtgaaaaagagatgaaccaggaaacatatcatcaccaaacccaaatgaactaatcaaaattatactttactcagttaaaaaattatataactgggtaatttggataaaaacatacttgttgccgaaaaccatttgaaaaattctttgcgcgtcatcgaagttgaaattatttgcgtagttctggtcaaagccaaagttcacgttatctaaataagattaaaaaaccacaaaaatactgtcataatttcgtcttttcctcttatctgacaacacttcataggcttgagatatcttcttgaacatttctgcagacttttccttattatgcggattcttatctaaaagttttattcgggaattatttcaacataattaccatgaattaattattacttatgttaaataaattataaaacgatagatgtacttaattgataaaaaatacctggatgatatttcatggcaagttttctgtactgttttttaatggcatcttcatctgcgtctggtgaaacgcccagtaatttataataaccggatggatcgttcgatttcattctagaaatatcagttgatttataaatatttaaaaatttttatgaaagataaccaatcttttggataaattagaaaattttaaatttaaggttcaagatatgaataaaattatttcctcaaagaccccagtttagtattttatttattttacaaaaatatatcctcaacaaaatgaataaaaactgatttcaatgatttttcttttaaatcaggttcaagattggggtagacaaaggaatctcatatatcacacttaacctttcatttattcacacatttttacactttagtccttatctttcacttcatctttagtttttttcatatttttaattttataacaactccattggtatttttatacttttccattttttaaaatttatatcctttacttttattaatttttttaaattaaaacttccaattttattaaaagttttggatgatactttatcactatttaatctgaatataaaataactttatcgaagactgtgtgaagggatgggcattaaggtgttaaaatggttaaaattcgttactctgaagatgtagtaaaattaatatcgcaactgtacctttccgaacagacgactggtaacttgatagtaaattattatcctttagattttgaagattttttagcccgtttagacgactggttgtcgttttttgagaatcattggaacatattaattgaaccagtaattaataattattataataatttattattttagattaaaaaagagttttttgataattatgtgttaaaattagactatgaagagcttttgaatttggatgttcctccgtcggttgaggccttcaaaaaggatttctactcctctcctgagctaataattgctctgatttcatcctcgcttcacattttatccatttcaaagtataatcaaactcggctagtaaattttaatgatgataaaaaggttaacggagttaattgtagattaaatgacagtgttactactgcatcaaatttatataaaccttcaactaactgtacaaatgtacaaacaagtcagtcaaactgtgtaaataacttttatgacgctgacccatccatgaataaaaaagttaacactaaactatatcaaaagtcaggtcaagaaaataatgtaaagagggaggaagattgttttttaaacagtttaggaccagaatctagtttagcataccctaagaaacaatctcaggatgaagtagatgattatgcagctcttctcaatcacttcaatgacacagtgaccacaaatagcatattcgccaactcgtctaatataagtcaagtttccatcctgaatgaattagatcgtgcaagatcaaatttagcatgtgaagttaaaaatgagcaatctggctctatttactcaggctcagcgaatttttctggcaccatgagttacagtaatactcaagtaaataacacacaggctattaactccccaatgaatatttctcagaataacagtggagttgagaatactccacaattattccaaaaaaacgataaaaaaattatccaggaggatgcggaacaggataatatagcagacaaggaggatagtactataataatagaaaataaattaaataacatactaaacagtacaaagttgagcaagtatatatacttaaacgagataagatataagtatgtgatagtgcgaatatataattataagcctataataagctttaataatttaagatctcacactattggctgtatcgcatcagtactcggccaagtgattagaatcagtaaaccgaaaactctaatcctgtttgcactgtttacttgtgcaaagtgtgacgagtgtttttttaaaaagttcaactcagggatttttacttcacctaaaagttgtattaaccagtcttgtaatagtaagcttttcatccttaataaacattacattatcacaaacacatatcagattctcaggtacccactgatacattagtttgatttacacataatacaatttgcataatgaattaggttacaggagtatataattgatgacatgaataatatcaaaaccaattcaatacttgatatacaggtaaagattatcaccccttaccataatacacgatgataaaattttagataatggacgacctgattggtatgtacaatttgggtaacatattgaatataattggtatcataaagataaataatgaagtgagtgcacttcaaaatggctctagtaacagtcttgtgtacaagttgtacctgaacacaatttcaattaacatttacaacaacaataatctgaacaataataaacactcgaattattataaatttattaatgacattttccacaacgagccgaacaggttttacctcatcgcaacatctcttttcccaaatctcaaaggccactaccacatcaaaggtagatatattatacatacgtttacacaatgttttcattagttggactgctgttgagtttgtttggatttaatcacacgagtagtaataaaatgctaagaagcggtgctaaggtaaagcgggaaaatatccatgtactgttaatcggtgaacccggtgtcggtaaaagtcatatgctatcctgtatttcatctctcggtacttttcactcagttaattatactattttatcatattttatcatattttatcatattattatatcattatgcagttgactgtggtataaaatttccatagggaatcacgttgtgaatgggaataatataagtaatagtgggttgaatgttggtattataaaggataacaataatgaatataacattgaagctggattattggtactatataacaattcaatactatgtattgacgagttggacaaactcaactccacggtaacacgacgcacggttatattgtttagaacatactactggaggtgatggagaaacagaaagtaagcatagcaaaaggtggaattattaagacactcaacgcaaatactactttaatctgcgccctaaatccaacacactcaaaattcaaattcacgtatgacactatcccttgacattaaatatgttaatgatattttagtaatgataacataattgcgaataatataaagctgtcaaattcgttgttgagtagatttgacctcatattcctcctaatgtaagttaatcaacatgataattttccagaaacgataagaataattattacgataattgtgacgacaacaatgaactcgtcaggaagctaaagtcattccaagtacttaacacacttactagttacacataatctgttacactcctaataattgcttagaaatatgattacttgaataacgtgttgataaatgagtatattgagtatagtaagaagtatgtgaacccgaagttcagcaaggaggggaagctaatgctatacaaattcttcaaggatattctggaaatgtcaaataaaaattgtgatgccaacgggaatccaataaacaactgcctcatgaaagtgacaatacgacaattacaaggactcatacgactgtgcaaggtaaatagtactcaatgtgtaaatatttagagcagagctagaggcgacttgttgaatgtgatcacagcggatcacgtgaaggatgtgattgaaatcttcaagaacacaatttactatccgttatacgcagttaaccagaacacagtggaaacacccgtgaaaccagctcccgtgaagaaatgcaatatcatcaaaatatttttgaatgaaatcaagacgacgaacatggaaaaaatgaccaacggagtatttacacaaaataataaataatttgtagatgataaaggatatggctaaagaattaatcgagaaaaataacatcaatatggacccagacgaattaatctacaagggtaatcaaataaataataaacttcagtaaataatattttttagtaaataatattttttagtaaataatattttttagtaaataatattttttagtgaataatattttttagtgaataatattttttagtgaataataaatttcagtgaataatattttttagtgaataacatgggatttatacttaaggatggcacatcatggaaaattaacatttaaggaggattccagtgattatagtactcagttcatgactgggagttccagcgaatatttataaatttacccagtaactaatatgttactcaagtattattttgtattggaaaaattaacgtaaatgtgtataaatgtgtataaatgtgtaattgagtaaacgtgttgtcgtatggggagctgattgagtattaagagtttgtttgtttgtaatttctgtaaaatcacgcctaatcaactgggtttaaacacttttgttaacaggcgtcatttaagattaaaaatttaacactaatttttataaccgctggaaacgatacacagaattccgctatctacggaaactgaacattcctatgatttttcatcctctataccatattatcttaaaaacgagactaaacacagacttactggatctttattttgtcaattggattttgtagattttatatttctaaaggcagtttacgattattttaaccaaacgcattttaatgacattttcaaataattattttctttatgaagttgattttatgaagttgattttttatgaaataatttttaccaaattgttttactaaattgttttactaaattgttctactaaattgttctactaaattgttctaaatagttctactaaatattgttaaatttgtaaaaatggctttaaagaagggcaaggctgttatgagttactttgtgaaccgtcaagggttgagaataagaacctacgcttgtgaagtggataagccaaaggggaaaatattcctagtccacgggataaaatcacattttttgggtgatttcgtgggatacaacgttgattggtaccttaaacatctgggtgaatccaagaccagtcacgccttagaattagaaaaatttgaacgaaacttagtatttaacaggagcttacatagttcttctaaagttaatcttcctgtagaaccaaacggtactcagaagaaagaaaaaggtgatgaggagactagcagagttcatatgtttaattgtgataatttgaatggtagagatttgttcgagttaacccctcgttataagtacgagggttcatttgtagagtaccttaacaatttgggatattcaacttactccctggaccatcagtctcacgggttatccgaatccgcaactgagaaacgctgttactttaacaactttgatgacatttgctatgacctgatccagttcataacactggtcaaaaagggtaatttcttcgacacaaaccagacttttaacgaggaagacattttgaataatggtccaaatcctaacatcaccacctcgacactttatactaataaggaccaaaatgatatgtattaccttttcggcttatctatgggtggaaatgtagtactcagaaccatgcaactttataacctaaagtacaaaaatgccaccaataatccaaaagttaaccttgttgatgcactcgtttgttttgcaggcatgatcgatattgacttccagtacgcctctatcaagttcctattcccactactacgactcgttaataaatttgcacctaaactcggtgtcggaaaactcccagactttgtagaaacactcaccatgttcatgagatcccatgtaattcactactcaattacatatacccatttatacccatttatacttggttatttacacttatttatttatacttatatatttatacttggttatttagataaatattgctaatgttggctgtaggacccgcattattactgtaagaaactatgtttaaaaatggcgtttatgatctatgatgcgacaaagactctggataaatcgtttgatcagtaccctagagacttgccaacaatgtttttacactgttctgacgataaaacctgcgatgtcaaggtaaaacacagctaagtaataatttttagggcccgaggtatcttatgaagactcatttttcaaactcaagtctggttaaatttcacgaaatcgaaggaggcgctcatgttatcacttcaccactgtataccagcatcacagggcctctagtctctgaattcctacaaagcctacacaaataatttttcattcccattctacacaatatttcaattaaaatttttattaatcattttaattatattatttagtatgataaaagtattttcgtggataaacaaatttgaataatggaatctaaggaggatttagaggataaaagttccatgttcaagggcttctcaaaaggtatgttttgggtaaattattaagcatttttagcatttacaactgttagtaaaaagacgaaggataaggtttggaatcttaaaataacttgattcagatctccaaggagaagaagcctgaaaaagaacctgaaaaagagcctgaaccgcaatcttccacaaaagtaaacttttataatatttaaattagtgtaatttatttatatacttgagtcgattaattggatatttttctataattatcaattttcagtcaaatcggaagttgagtgtgaggattccaccgaaggaatactctgaagaattggagaaaaagtataaaagaatcgcaactaaaggaggtaagaaccttgaataattctttttttcagttaagaagctttttattctcctaaacaatgctcgttaatgttcacaaatctgcaaaaattaatctctgaatgttccataatttcctacaccaatttataatatttattaattattatcaaatttgagtatttatttgtttggtgtaaattctgagatatcctgaggattccacgggtggttctgtgtacaaagctggctaaattggttatttttaacccaattgagactctaccaagttcaaatttattcattcatatttttcatttattttaaacgcatttcaaccaatttaattctcttaatcttatttttacttgttttttttcaattttatcaaagaagtatttaattttagaaataaactaaaaacttcaaacatcatcagatgaagtctaattaacttaattttataatatttttatcgcaaattagctaatggagtgtttaaagtcctctgccttaattcccggagagccggaatataaaagtgaatgtaacttgctgaacatgttactgatgaaggtgcccaaagatgttgatcttctccctattttaaatattaagcctctgcagcctcgacacagctcagctttacaggagttacaccttgaacttttcccagttcactatgatccgactttttttgaagtcgcctgctccactgagtctggattttatgacactcagtccttctgggacatgttcgactcctcctcaaacagcaccaaagacttggtaatctcacttttacacagttattcagttattcagttatttagttatttagttatttagttatttactgtgtatacaattagtttactaaaccacagtatacatttgtttaggactggtatgagaatcagatattatcatttggcttatttttacctcgtagttatgtgagttttttccgaaaatctggaaaatatgacattgaatcttatttggagtatgtttccactgaggatgagtatacagaatttgacgatcctcttgctgaaatgttaatatttgaccctgagtatgacgagtttctcataggatttgtcacgctattaatcaatttagaagtcaccaatagcctaatctcagacgacgattataatattttatacacacactatcataatatggaaaacaaatccattctcaccaacgagataaacataaatttggacaagtttgacgttgcatactacagtttcatttataatcagttgtataataacaaattactccttgaatatacaaagaagtttcaaattaaggacgcgaaaactatttacattttaagcactggaattactctgggactcaggagaagatcgctaggaactcacctgatcctattcactcaattacttatcttttttattaactacagtattatagtttttgaaggctattactacatgctacactccagggaagtactcgagagtattaagaattactataataagttattattccaggatgaccacaagctgttgtatacattttatacaattttgttaaatgataatagcgtctgttgtcgaagaactagagatgagttggattccataattcaggataaactcggtaaacccaccagtaatctcattgtcaaccccaactccgatgaggaatctggtattaactcggtaaaatgtgtgaataaaataccactggtgatatatttgcatacaatttattacaatgaagtggctacggaaatgtataaaaagttgcatttttacaatataaccaccatccccaactattataacattaataataagcggtacaacgccaactttttagcatattttctgccaaaaccttaatattctaactgtaattttgtgtaatatataagattttattatattaatttgtgtgagttaatgaatttctgaaatgagaataaaaagtttttcgctgtggaaaagtgtgtaatgaagtgttatcttttgtagctgaaatcaagtgttgccattaaatctcttctcaaatcacgggtaaagattaacttgaaatttttccagccattttgaagtgccttgtcaaaccaaaatcccaaggctcttttatttgacaatccctcagtaggccagttggcaaaatcgtgttttttatactcattaatataaccttcagacaaaaaaagaaaaacaatcatagcaccggtagtcaaaaacccgtttatagtaggaagatagtcctttgcgccaccagagttcttttcaacacctggaaatccaacggctaggagtatcatatggcttacataaaacaaaatagtcaaaaatccaaccataccgggtttatttacaatggctaaagatgtgcctgaaaagggatagtgaagtgctctgataaataaaaatccgcaaatacacattactggaataaatatcaaagttccatgccaatagaccttatcaccatcccacttattcttaggtgaatagtcatcataaaacttagaaagtaaggcagaagtaattgatggaattggagcaataacaagaagggcttgatctatcttattgacatgcctaaagtccactagaagacctggggctatagctgggtaaaaaacgtagacaacaccctgtgcaaacacacacattaccattgctgatatgacatgaccggaaaattcaccagaactaccaccattattattttcctgatttttattaccaccgcatttattatcattgctaccattgttattataataaacggatgcccaagtcccagcagttgcccccgtaattactatagatataattatttgccaagtaataatatgaaaatcagtgtcgtgcctcctcttattaccaaataacctcaaaaatataaagtgataaacagatgcgaaaataccagaaacgtgaagtgtcgataaataataaactatacaatcccctgccaatttaataataaatgacaaattcattccgtaaacaaaggccgaaaatgccaatgcccagtaaaaatcagtcaaatgtccttcctcaccaccagtaacaaaaactaccaaaagaactacattcacaagaaaaaaaagtccattaatagctattgataccttttcacattcttgtccatagtcagggccatattttatggtataaattgttccggctgtaactccaacgaagccgcaaagttccattgcattatgaactctactaacgtaaagactgaacaaatgttcaggtatcttaaatctcttcatacagaatggagctccattcataccaaccctaagggttagaagtagtgaaaatccaaccagcaggtaggcagcaattttctttggatcatcacatccgttctgagtagcagcgcttggagtcataccattcatacaactatattacaaaggaaggtggaataccaggaaaataatttttatcattcctccacaatttgtttaccaaacttattttagttgttaaaatcattaaaactaaattgaacattcaattaatcaaatactatacaaatgatataaagttaatttaaggttaaaaattagaaatttaaaatttaacaaaaatcaaaaaattaaaattcaaatattaaattcaatatgaaatcagatataaaacaattaaaaataaattaaattcaaacaaaaaatctattaaactatcacattatcgagataatttggcattaaagcccgattactaaagttgattattaccaccagattacatattaaattcaaatattttaattcaaaattacaacaaatctcttttaaacaatttctaaaatattttaaacaatttattgcaaaatacaacactcaacttatttatcatatttgttaatgaaattaaaaattttagattccctgaactttattattcaacaaattcacctgttcttcaacattcaatttgaaaaattcctggtcaatttcaacaactttaatcccttcacatcgtaaatggtacaatttattctcgttataatatgccaaattattatacataaaattgtcaactctactcaataattctgaatttacccctgaatcttccaccgtgttaccagtagtattactattgtgattgataataatagctgattggttaattggatcatacaggggtaacagatatggcccatgaacataaggaataaactccagttccagctcctttaacacttgatttacctttttatactgttttacactactgtagtttaggtcaaacaatttgtagtccaaatggttaggaaaatttaataatattttatcaacaaattttctcgtaccatcactcaacatttcaaacaactacacatgatcatgtgtaacggtattacttacatctttgttattatatttcaggtagtaaatgaccagttttaacattaaaacgtcgttaaactagaaaaatttaattaatgaattcttacattgaggtcaagggattgaaatttactaagaataatttcctaaacgttaaattattgaataaaattaccaaattcctcagtgtcgcaactttgtacattacaagactcagtcccactgttatcaacacatctttatccaaatttccatacagtctaaagaacatcattgagttaaaatttaccttttcgcgatgttattatttaaaattgatttattcgtatttaacatgttataattgtgtaaataacatatcaaattacttatgtcctacagccaaattaccgtgttacacaataattatttatgtagtactacggatccgaggttgttaatttttgagagaattcgattaataataaaaatcttaaattcttgatcaaaattattactcacagagtgtaacaatttgagtaaatcaatggtctcaaatcttttaatcctttgtaaaactaaggaatttgagttagtatgtgttaccttcgttttggaggagtattaggaacgactttgggacaaaggaattttgcagaaaattacccttggaacagcagtaaattaccctcacaacgtccttgtcactcacttcacaaatgttcttccccaactttctcgttacaaatgagataatttcctttagaaagtttatgtttggagatttagtaagtttactggagagatatgaagcgttttggagtagttttactaaacttccgaacctccagaatgagtcagactgactcactgaggagtaaattgcattgtaaatattggaccaattagtgttataaacgagtttataatcggaggcacatttgccaatcagtttcaacacatttgaaatgtcattttggttataaatacctttcaataggatgaatttaagattatttggaacaattccatcgtttacatgttctctgcttaaaaatgaataacgactccagggcattctacagagaatacccgtgccgttggaacacatcacacagaacaatagaaatttataatttaataatagtaagatgagggaatttacagagtaaacagtggaatccagcacgatacgtccagagagaaaaaatttcacaaattaccaaaaaaaatttaataaaacaatttaacaaaaattaataaaaaattaaataaaaaatttaataaaaatgtttaagattaaatttattgtgttttcagcgatttgaggtgtaataacttcgttcttaaaatgccttcttcggttaagtctggtactagaaatactaaatctgagttaaacgggagactttgcgatttattaaaaacttcaggattatacttgaaggttgtgttacaatttgggcactgagcttcagttgtgtttttcatgaattgcttaaaagctttttctgacatacagcagccacaattccatattaaaacggctctgttcgtagctgaaagctcagttcttaaaattggacatagaaaccttcccgttcccttatcaacctaaaaacatccaaaaatttcaacaatattattaaatatttaaatatatttataccaagaattctatgtctttaatatcttttaagccttttaaatgctcaaaggaagggtttggtttctttgataaaataaatttcaacacggcctctttattatataataagcccagtttacaggaaactataggcggacttaaaggctcctaaaaatcattcatacaaattaactaataactaagattagataattaaaataattaagattagataataaaaataattaaaaaatgtgttaacttgtgataatgcgcaggttttccatctgagttctttgatttggttactggagagatgttcattatttgccctgcattgagtgtttggtaagtatcccattccgcctagattccggctaaaggcgtaacctgaagtccgaaccaagtcaatacgactcggaatgctacctccgtcaccgcccattttacaataaattatttaatttaatttaatatattttattttattttattttattaaaattatttttaattatttttagcctcacgtggttataaattttattcattttattattattttacattgtcaaatttgtaatatattttaatatataaattttgtattttatttgattgtttggaaaatgtacttgaagtattacttggataaagacggcaaaagagtttatactctacaggtgacaattaattattaattaattataaattaaattaatttgtgagttaataatttgataggatcttggccctaacggcgagccttgtttaactgctcatcccgccagattctcgcctgaagataaatactctaaacaaagaatagcactaaagaaaagattcaaccttttcatgagccaataactttctcaattttctcaacattctcaattttcttaactttttaataattttctaaataattttctaaataattttctaaataattttctaaataactgtctaattgacttaatctttaatttatcaatttttacactatttttacattatttatttttcatttatatcatttacatttgcgattatatctgcagtaaaattattacataattggttcaaaattttgaatattaaatccattaagccaaattttggggaaaaaacgcaataattcctttgtaaacccaaaattttaacttttaaaaccttattaggggatggaatctgtggaatctcgaaatctgatttgcacactattaatagtcccaagcccccacgggtgatgtcgtaacttatatcagaatgatcaaaaatttgcttattccacctgttttaccgttttaaaattatttttttcatttggaaggagactttgagttgattaattttctacactcgcacggtttctgggccttctactagattttattgtctttgattattgacttcagtattgactttctattttatgtgtggatttattccaccaattcactactttaaatgttgacactcatttggatattccacatctaatcactcaacttttcattttttcacttctcacaaagtttatcacaatttcaacaaattcatcaaatttcaacaatttttatcaaatttataaatttctaagtttacaaatttctaagtttatttgactggatcttcaatttctgggattagcgtgagatttggctgttatgatggaatctgagaatcattggttattggacattgacgagccttgtgacatgtcattgtccaccactccttctcccaactccgaatctaacttcgtcacacacaaacactccaaatactctcacaaccatccagaccacaccaacaccaattccaccgattattccaattcccacagtacagaatactctaacggttattccactgattatactaattgttattccactgattatagtaatggatatagtacagaatatggtaatgggtatggtacagattgtggtaatgggattgatgatagtactccgttgtttacgccggatgagtgtagtttggagaattacatgtcttcgatatccgagttgaatagggagattgaggagttttcgaagatagtccagaccctggcgttgtttaaatattacattaagaacaggaaaccaaatactaacgttacggagttgaataaaaggttcaacgccatttgctcagactgttcggcgaaaattcatcgcatagaggagaagatacagaagataaactatgaaaatcactacgtgatggttaataggaagaggttagaactgcaatactctgaggtcaggaacaggtttaaccttcaagactcctcagtcaagaagctgagaattttaatcgacaccttcaacaccgtcatcagagaatacacaaacatatccaaaaaactactatcacaatcacaatcagtaccagattcgcaaccagattcccaaccagatttacaggtgaccaatagaatattaatattgtataggataaaacgctgttaagtgagatgaacgacagagttaaacaaatcgaactactcgaacaaagtactcctactctatagtatatatatatagtatagttaagtagctccctctcccctagttacttagctccctctcccctagttacttagctccctctcccctagttacttagctccctctaggggtatatatttaattagctccctctaggggtatatctaagagtatgtaattagatagctccctctcgggtatataataccaagtatatagtaagatagctccctctaggggtatatagttaattagctccctctccctctccccttatattattagctccctcttggggtatataattaagtatagtaagatagctccccttaggggtattattagttatatagtaagatagctccctctccctctacccttatattattagctccctctaggggtatattattagctctctctaggggtatataattaagtatagtaaagtagctccctctaggggtatagttaggtatagttgagaagtttatgtagtgaggatgttgtaggtactagggatttggatgagttgtttattgatttgggtaacataattaagaagcgaggcgataacatctcaaccatcgaaaatgaaattcttctctcctcagcccaaatcggtaatccacacatacaactattatcaatattattattatattatcttgttattgtgttgattgatggtttagagaaggggaaggacgatgttgattttgttttacaaaatggctcacaaatccaggtttgctttacggtgcttgtactcacagagctcactccagactctttagttatgagttatttaccccttccagtagctttatttatcctcttttatcattatttatcctctattatcattatttactaagttatttggcccgttgctgggtagttggagccgcatcgttaattatgttgtagaggttgtatttttactgtttatgtgttgtgattggtacgatattcttgataacgccttcaaacctaaagaattacattttaaaatacttttccaataacctctaatctacaccacacccttccacattattcataatattccatattttactatttatattagtttaatattaataatggaccgagtggagatagcgtataatcatttgttgaattgggtatgtgctaggggtagtttaccaaacgactacgcgataaaactattaagtgagattccaaatattattatagcgtttagacattgaagagtactgtaaagcgaattttttagaaaataacattcccgaggacattaaacatatttttcataaaaacgatgaatacaccgaatggtacgactcactcaaccaagccttccaaaccctcaaaaatgtacaaacccactcttaccctaattatataccctaattatataccattagttaatagtattagttatatagtattagaattgtgttaataatgtgaatagtcggatgagggacggagagtgaattttattggtcagtatacgtatgagcctttgcagaagttgaataaggtcttgaaaaatttcaggaagtataacctacacattgtatcatattatcaattactgcacaaatatgtcaattactacatccccttcctcaagaaaaacatcacctccactaccacagaagtaatacacaatgttctatttctcttactattactataccataactatacccctagagggagctacttaactatatacccctagagggagctaattaactatactattaactatatagcgagagggagctactttagtatataccccaagagggagctatcttaatttatacccctagagggagctactttacaataccccaagagggagctacttaactataccataataatatgtttaatattgtgaatagttgaatgagatgaaattgaaggagttggaatcggtgaagagaatgaagttgttgacactggacttccggttaaaattaagtaattacggcctagaacttaaggattacccatttactgaagagtttcagtcagttttattctttgatttacaagagaaaattatccaaaactcaatcaaacacatgagagagtcttaccaaactgttgtagaaatattaacccaattatacgttcccttggtaaggctaatggaattattcgttcagtaccaagaaatggagggaaaatattcagttttagagtctacaaagttcctaaaacacgcgtcagaacatggtcttgaaccctttcaactcgcgtcaaatctacaccaatccatacaatcctcccacagtacacaatacccttttatacttaattacctcgttataatattaaatatgtatgtaaaattagataattgtatcactgtgacaatatgtcaggtgacacacccgatgattccgaggtaatagtgattgaggagggagtaaaattggatcccgagactggcaaattgttcgactcatttttgggtaataacatgtgtcggaagtttctgctgagtgacttgtatgaggtattaatcttcatcacgatccgtgaggatgagcttaaaagagcctcctcaatgccaagttataatttactcgactctacagatttgccagacaaggttctaggcctaacattgccagattacgaagaatataaagcgaagttagagttggtaattgagttactgagcggctcaaaaacgatgaacacccaaggctacctcaagaatcagcagaaattatctgaaaaagtgtactctgaaatgactctatggacccaggcagtaaacgaattaaccaaacaggggaattatcagtaccaaatcaagtcactggaaactaatcttaaaacgctcaaatcagatctcgaaaacacaaggaaaaatgttctcaatgttaaacacaaacttgaactcgaaacctcaaacatatcaaaacttcaagttcacatctttggagatatcgatcacatttaattttgtaactttaactatattgtagtaaactgtagtaatttataactaagctccctatggcagtcccccgcctcactactatccgggcaaatctccgcttgactttggcattcataagggatccatactactcactgtactatattgactcaataactaatctaattgagtataattggaataaattatttgttgagagatttgagtacttttcttcgttgttttttggcgctcatgagcttgaacctttgaaagtcgttcaggttctttttcttctccaacactcgcagtttcttacccaaactcgtcttgtcaaataactctaaagcgttctgagccttggcagcctttgataatgttcctgtcctggcaccacgctgtaactccaccctcacatccgttaacttcaaccacgtcttcggtacctgctgcctcttcaccctaataatttattatacaatattcaatagtataatattatttagtagtatattagaggttatttaggggtaaaataagggtaatttaggggtaaaataagggtaatttagagataaataaggccaatttaaaggcggaatagagctaaattaggggtaaaataaggccaatttcaaggcaaaatagagctaaattaggggtaaaataagggtaatttaaaggaaaatagagctaatttaaaggaaaatagagctaaataagaagaaatttacccggtgacgtcggctccatcgactaaaactctggttggcgtgacgatatcaacgacaaaaacaagctaaaaaatattttaaagggttgaaatttacctttccagaattcgggccataagtcaataggcaaagacgtccaggctccacaaactttttaaacagtggcattcctaattatacaaattatcaataaaatattataaatgaagaaatgtataaaaatacttgataatgtaaattagattaaaaatcggaaaaattaaataatatactaaaaatataataaaaataataattttaggaattaacctgtgatgttagtcatggggatcaaacaagtcaaaggattccaccaaataacccatcccaaactataaactcaagaattataataattattgataaaattattatttcagatcaattgttatattatgttattttattaatttttggaacattattaaatatatccagtacaacacacttttcgcgctaattctcccaatttatcctcaaatattattaatttattcctaatttagtgtaaattatttaatttaaacgggttttggggattttggtgatatattctttattcacccaattccataaaataatattaattatataattttttaatgttataaattatttattttatttttattaatattattattaatttgagaattttattttattattttattctacacactctggcacttttcaacgttttaacacattaaatttgtttacttcttagactaagtgaataattttgtgttggaatggcggaatgtcttgagcgtatgtcaacttcaaatactcttgaggagaaaccctcactcgactcaatccgagaaaaacttgccaccttcgaatcctccgcaattaacctcaaaattaaacaaaaagatgatctcgataagttcaacgtaatttcctactcatcccccaatctacacatttacacactaatttacacatttttctacacatttacacacatttttacacactaatttacacatttttctacacatttacacactaattagagcccccggagggcgtaaataactaaaaaataactaaataattgagtataattgagtataattgagtaaataatgttgtagagtataaatgagatgatttgtgatttgaatgatcagttgttgagagagtctcaggagcgtttacaatcaagagaattactccagaaagtgactgaggaagctgcaaaccgcatgttatcaagtgtacagagtaaattaaaccataaagtccgatccctagcggtaaaatattaaattttataatttgtcacaggagaaattggataaactaattgacaaatgcgccacactcgaaaactcagtcaatgaactcgacaataaaatcaaccgatccgtaaccacattttatctccatagtttagttatctacagagtttaagttatctacagagtttagttgtgtccacgagtttaattatttccttaataaacagtgtgattagggatatttggagttggtggagtgtgacatagcagagttgaaggcggcggttagaaatgacatcgtgtcaaaggttgataaggacactgacatcctcgatcgcatctgctacctgcaaaactccaatcgcatcaaagtaatcacttagttataacaattaccaccgggttatacccagcagttaattacgcagtcaaattactattggttttagatcaatgataataacatctggaacaacgaatgcatcaaggaaattaaacaaaatatcacacaattcaaaatgtaacataattattcagtttttcacacttttcacactttaccatatttacagtattcacaaaattcaaactgtggcacaacaatttggtgatataattttagcgattggggtgtaaaattgtgtttagggtgtgtgagaatgagaatgagatttttttaaagtatataaccgtggagttgaataatttgaaaacggcactcgagtctaccagcgcatcaaggaaacaatccgacaacttcatcctacaaaccatcgatcacatgatgtcattcctacccaaactcacacacaactaattttatcaacacattacatttttaatcaaaattttcataaaataattagaaattaggcgtaaaaaaaataaagttaaaagttgatcgggttacgaaaataaattttctcacctcgtaacttttgctgctgtaacaacgcatttggtaaaaaataattgcaaaaagtaaataaatgccaaaaaggttgcaaaatggtaaataatggggttgtgtaacaagtatggatatgagattaggaatattaattggtgttggcaatttcgacggctgatttgcaaacggaatcgaaatcggtgcagaaaaggtgtggaatattcgactcgttgagtaatttcttggcgctttcagctctcgtgccttgtagtctaatgaccacaggcagttgtctgcttaatttcttacttgcctcgacaaaagactcggcaaatttatcacaccgcacaatccccccgacaatgttcaccagcagaaccttagccctaaggtctgagttaacaatttccaacgcttttgacaaggtttccggcgtcgagttaccgccgacgtcgagaaaatttgccgctttcccgccgtggtgttggattaaatccatcgtcgccattgccaacccggcaccattcacaatacacgccacattgccatccaatgagatgtaatttaacccagcacggtccgcctcctcttcctcctttgttctgatcaccggagtcatatcaaacaattcactctgtctatacttcgcattgtcatcaacaatcaatttcgcatcacacgccatcacatttgatttaacagatgatttcacagatgattcaacagatgaattcgcagatgattcaacagattgagtaggtgatgatttaacgtctgaatgagtttctacgagaggattaacttcgagtagtgtcccgtcggattttacaaatgtgtcatagagttgctgtacagttttcttaacttgttccgtaacttcattgctaaatgacagttgtttcactagcaactcagttaactcgggggttagccccgtcagtggtgagatttgtagtgtcagaacagcgtcgggatgttggtgtgcaatttcttcaacatttcctccgccgtgttttgtggcaattgccacaatcccgccggagcctctgtccagcgtaaagcttaagtatcgctcacttttaatgcttaatttctgagccactaggacctctgtgcatagtaaacctttgcccacggtttgctttgtggttaagtaattcccgagcattcctctggcacaggctgagacttctgagggcgatttaacaatttcaacgcctttaaatccggtgttaaacgtgcccttacctctgccgccggttagaactaacgctttcactactaattccggtgtgtttgtgagttgctgtatggattttcccgcttcaaacgcctcttcaggcgttgtagcgttacggaattctggaactctaacgccatttcgcttcaaaattgtcattccaatgtactcactcacgttcagaaatcttttactcagtttacactgagaaaaattatttacacagttgaaatatttaaaatatgcattcgaaattgatttgacaatcatcttttacaaaatattattaatcattcgtccccatgtgtaattattttaattaatttttacaattatttttctaatttttaaattaattttataataatttattagatacaacagatttctcaattaaaggtaattgaataatttacacattaaatgatgaaattatgatattacttaaaatataacttaaacatttctgaacagagaaaataagccaattttaaaccttaaaaaaatctttacaaaagttccctgatcagctaaaagtgccaagtttagtgcttaaaagcaaggttaaactcataaacttatcaactgtaatataaacttggtaatataaacttagtaatataaacttagtaacataaacttagtataaaatgtgtaagaatgtgtaaaaatgtgtgtaaatactgtaaaaaagacacgttagtgtgtaaaatactattagtgtgtgtaaaaaggtaaaaaatgtgtaaaagggtaaaaaatgtgtagaatgtgtagaatgtgtaagaatgtaagaatgtaagaatgtgtagagtgtgtaagaatgtaagaatgtaagaatgtgtagaagggtaaaaaatgtgtaagaatgtaagaatgtgtagagtgtgtaagaatgtaagaatgtaagaatgtgtagaagggtaaaaaatgtgtaaaatgtgtaagtgtgtaaagtgtgtaagagattgttgcgataagccaagggctttaggtatgattataccaatgttaaggttggtgatttacagagtcaaatctctcctgcttcttcggcacaaacttacacaacggaaatatattccccacccccactccaaccttattcatattcacattattcatcgagttgacagtgttcacagcacccactgagttgacagtgttcacattattcacagagttaatagtgttaatagtgttaaattgattggtggggtgaaaggagttgaaatgttgaagggtgttaaatcttttatcgggaaaggtttgtcctttatacttaccaccaacgtactgtccttttccatactgatacttattctgtcccctcacatactgtcccttcatattattatactgaggcttatattgctgcttattaacaaactgtgtaccaccgaattgtgaactaccaaattgtgtaccaccgaactgtgtgttagaattaccgaattgtgtgttagtattaccaaattgtgaattgttgtactgtgtgttattgtagtgtgggttattgatttgtagtggtttgaggatgctgccgaggtttttggcctttaggtattctactgataatttgcccttttcatacgtctcgtagtccgcactatttatactataatacctcatactctcgtccttaatattaccccttgccatctcattactattaccaggattactggtgttactaggattactggtgctactaggattactgttggtagggttaacaccaggcaaattcccccgatccacagggttccccgggttattttgattaaggtccaggtttagtcctgaagtgttctttgtccaagaattctccacattgccctgggtaccaccagtcaccaccacatcctcaacaatattacccgtattaacagtgttacccgtattaacagtgttagtattacaattattagtattgttcgattgtatgaacttgtaaatgaggtgtctgtagttgatgagatcgtatttgacgttgtcgcagacggggatgctgatggccctggccagtcttggtaacggcgtgtttttgtgaaaattactcaaatacggatgtgccagtgcgtctacagtgttaattctctttgtcggattaaactgcagtaatctgttcaacagatccaacccttcttcacaggtgttcgggaaatattccttgatattctttttccgtatggttagtgatgagatcatgaccttggtgaagggacttgataacgagtccatatcctcctccgacggcattcccgtaaacgtaatcaccttggctaattggttaatagtgctggagccagggaacatcggcctgcccagtaacatctcagcaaatatacaaccaatcgcccacatatcaactcctttagtatactttgtactacccaccaaaatctcaggagccctataccatcttgtagccacgtaatcagtcatcactattcctacaaatggattatactattgagttagtatagagcaattggtatatacatatctactatgaaaaccaaagtcaagcgggaactggcccggatagtagtgaggcgggggacctgccaactaactatctaactataatattattatactacagttcactacaatattaacactattaatagttggaatagtctagtggtatatacatatctactatgaaaaccaaagtcaagcgggaactggcccggatagtagtgaggcgggggaccgccaaagggagctaattaactaactattactaagtatataattacagtagataactaatactatggtatgtaaattaggaactagggacaaagagagagccatcggggtggctatctgtagctaaataattctgtagatagaactaagtaataaataactagtgtgagcggacctgacaccgtaacggtacctgtagtattatctttggataagcatttatcgagtgagttattattgggtgctacagatctggcgagaccgaaatcggccagtttaatattacacttgttattgagtagaatattactgggtttaagatctctgtgtaacaagtcccccgtatgtataaagtgtatagcctttaataattggtacagaatgtaacgtttgtgcacttcctcaagtatgtttgacctgattactgcgtgtaaatcagtttccacatactcaaacaccaggtacacatctctgttattatccgccgggtacacgtccctcagcttcacaatgttcgggcatttcttcagcttctggaggaacataatttctctataagttctctgagcgtcagttgagtttcggaacgcgtcaaagatcttctttagcgcaacaacctcgttcgtgtcacgcttcactgccttccaaactataccatacgcacccttgccaatcttttgaattatcttataacgcgataatatatgatcatctatgtgctcactcacctccatacctggaacagagtcgctcaatttcaatatccaaagccttttttcagcctcaatttatccctatttagccttaaatttacccttatttagccttaaattccctcaaattacgccttaattcccttaaattaggcttaaatttgaccttatttagcttaaattcccttaaattacgcttaaatttggccttgttacgcttaaatttgaccttatttacgataaattatgtgtaaaattggctggaaaatgtgtaaaaatgtgtaaaagtgtgtaaaagtgtgtaaaactttgtttgtgtgtttgttgaaaaattcgaaagagaatttacgggtaaaaaattaatatttggctcagaatttgagctgtaggaggaagtattgctggagtttaggtaaggtctgggcttagtgggaatctgtgccttccatagtaaaagtaaagctccagtgggcaaagtgcaagagttcgcgctaaaagtaaattttaaatgacaaaaacgtcattttaaaccttaaaagaaaggattctgaacgaatatttactcacatgccagcgtggtgaaggcaaaggcggaaaggtgcaacccaaactctcagattctaccagaaaaattattaatttccacaaactaaacatgcacaaaaattattatttccactcaagtacatctctgaagttttaacactgatgcaacacttaccggaatcaaacccctttcaacaatttaccaacccattcaaaggctctgagggcctaaaaatggccttaggagcctttaacacagtaactaacccaggcctaattacacatagaaattatttactcaagacttccacttatgggaacaaggaaaatcttccaatcccaaccacatacattttacacatttattttttacacattaattattttattttataattattttattattattttattattattttataattattttataattattttattgtttttggtggaatttggttttatttcgggattccgctggagtttttttcaatatttcatcaaaaattaaaaaaaaataatccttttgataatttaatctttaaaatttaattgattagaatttttatttcttatcctaaaaacaatttttacacgtttgtctggtgttttaatttattaattaataaaaataaattttccgaaaaatttaaaaatttaccaaatttaggcgagaaatttaatttacaaattgactaattcttggttctgtccgttatggccaacgtctgttctgggcaccttactgcacttgagatgttctggattcgtccctggcgttttcctgaactttcccaaaattttgtctatttcccaaattatttattctctatcgcatttttaactttattttattttttacattagatttaagtttattagttagattgtctgaatattttgatgatttacggtggaatatttggctaatgagttttaaatgtattacttttctactactttttattcctcacacattcgtaaccaatcgcagaatcttccgaggtttccacaataactccctatctatcccctaattatccctatttatcccctaattatccctaactatcccctaattacccctatctaggccttaattactccttatccatgctttatttaagcttatttaagccttatttatggttatttaagccgaaaatttcataatttactccctccaaggctctcaaaatatctcctatctatcccctaatatccctaactacctacaatatacaccctaaataaccctaactacccgttaattgacataaaaattggattaaaagtgttttagatttcaagttgaagcagaaggagtattcgataatagctccgagtagatcagttcagggtcaggactttaatgtgatatgtcaatcggcaaaatgtggttacaaatctaacactatatacaatgttgtgaatcctgagtgtggtaattattacacttgtcaagaatgtcctccttccttcggtactgatatttgttacctcggaattactaattccgactggattaatgttactgagggtcacatgacactttctaaacacgaccgagtcttcgatcatcaacccaaacccaccaaaccaaacactaaaaatacctacgactacgatgaagatgaagattcattcctacaaattgacacaagtactcacacacatttaattattaatagtaatatacttaactacttactatactacttattaatagtgtaaggggtgggaggggagactcgaggaccagtctatggagtagactggtccgagagcgaaattttttttcttgctgctgttttttcctcgcaacctcttcatcttactatcctcaaattagtcatatttagtcatgatttaggcacattttaggctttaatttctcttaatttggctcttaattagtgttattttagtactatttaggcacattttaggcacattttaggcttaatttagctcttatttaggcattatttaggcattatttaggcttattttaggcttattttagtcatattttagtgttattttggctctattttagtgttatttacccttatttcacccttaaaatagttatttttgcgcctaaaatttacttattttactcctaaattacgtataattagtgctaaattactatatttaagtgtataatattgttagattgggaggcgtatggtatgagtttggtggataagataataacatcgcagacgtttaagtatgttgaccaccacgacgacaaatggctaatggagaataaacgacagtgtcaaatcgaccccgaaggcaatttagaactctccatacgactcatgttccaatactacaaaagcccactcatcacagacaacaacgaacaacaagaagaattgtccacactacaactacgttcacatacctacactgacaactctggtgactcagttgacagtaaccccgttaactccaataaatctgttaactctgataactcagtcaaccaaggtgataatgttgtgttgttggagaagggtgaggattattatgatgaggacgaggttgagaataatgacaacttcttttctcacatggcgaagaagggtttaaaatactcagtcaacactgggaaagcgtttaaggacaagttatcaggtgctttccggttcctgtaccagaaggcgcaggtaatcatggcgaagcctgaggtccacatccacttcgtcgtggatgacattagactaaagagctgcagacagccgctctcgtggaacggtgacatgacttcaggcgccatgatcttcgtcgggaaccagaactttaaaatcagccacacagtactaaacgcagatttcctcaaaaaaggcatcagagtcaacaccagcgtcaagggagtctacgaactatccttcaactcgtgcattcaaatacattgcactaaacgacaacgccaattcggccattatcctacacacgggttcaatctatcacataatctctcacatcttctcaatatcaatccaatcaattcagttggtagtgttaacggtgttaatccggttaacagtgtcagtacagttagtcctgtaaatcccgtaaatcctgtgaatcctgtggttccgatgggtatgaatgtatcaaagcctgtgatacagccgccgtcacaaccagtaactaatataccatcattcaatactaaccaggtaactagtgctgctgtaaacactagtaaccctagtaacccagtaaacacagtgaatcaggtggtcaatgagggtgatgagaagaggaagaagttatggttgtatgggtcaattggagtagtaatattactagcagcagtttcagtcccaatcatactcaaattgatatctcactaatgtactattatactatacaatatatactatgtataatatactataaccttaactagtatattactgttaagtactttagtatatcttaactattactactttactatactcttaactactgtattgttcttaactactgtactatagtatatatttagtactactacagtgctataatcttaatcccagacacctaataattatactactatactaatatactatgtataatatactataatatatattatatactgtgtatatatgtatattagtaggagtatcctaggtacaatactaaagtacactatacacaattactacaccttaaataagtattgtaataatatttacaagttatttacagtataattaaagcctaaattacaaattttataggtattggtaagaatgtactggccctaccaacgccttactggaccctccgaaacactcaaaataatactaatattgttaattatggctgcggaattacagtataaagctgagaccaagaatgggaaacctgttctctactccagaactgacactcaaggtgagtgggacgacataacacacactagacacaacttggatgatttggaactctatgacttagaattgaatttaacaaagttctctcagtgtccagcatttctacatgggtttaccattaggattattactcttttcctctgctaccacattaagatgggtgacaagttactatggtcctattgcatggaaccttaccaaggattacccactgaaatactattcaatttgaagaacaacactatgaatttattgtttaaggagaatagattggagaacttgagtatggaggggtatttgactgactgggtggagcctgggaaattacttgaaaaacctgacgactggaagttcatagaaaatggtgacacagaggcatgtttgtttaatgaggaggatccctgcttagggttacaaattctaggcaaaagcgtctggatacacaatgaaaacgaaccctatccaatctctgtaattctcgcagaaaacaccaacactctcgtcttcccaaattactacacacaattcgatcttccacattaacacaatattatacatagtattatactgtagatagtattgtataattagtatgttatgtagtagattagatgtttttggggagattatgaggggttctttctcttccccttgattaaaaatcgcatcttcctctttgttattctcactttatcctcctacaaatatttacagtgtgtaaattagtgtgtaaatagtaagggagtaaataagtaagtgtgtaaataagtaagtgtgtagtaggggagtaaataggagtcctggagggagtaaactatacaacttttagtacaagcaccgcaaagcaaaccttgtgtatctgttgttttagccatttattaacattatcctcatcctgtttagactcgcccaaagtcttaatcctcatcttctccattacatccaccaaaccctcagaactttcaacactattcccattttctacactgttcccactttctacactgtcaatactattactcagtgtatagctagtgttggtgggaggtagtttgcagtatagtaaatgcccttgagtgaaatcgttgatgatgagtttggctgctctggtgtggtctagttgaccacctttaccggctgaaatgtaattcctattcttacacaactcctccaataccttcacactgtacaatactctcaccccttcactcattccgtcagcattcacacttttggacgtagtgttagtgttattcacactattggaagtagtgttagtattattcacactattggacgtagtgttagtatgtttcagagtgatgagacactgattgatgtcaatgtcgtatcgtttacagacttggtgcggtattaaattacatatcaactgcacagccacagtcatgtcacccctaaattaaacatacaatagtattatacaagttttagtagtgtaaataggggactgggttgtcggggagtcaagcacatagcaacagtagtaagtaagtggtaaatttagtattttagctatttagacaggataattttagttgttttagagttataattagggaattttatatttattttgttaatttaggggagggttctaggtttagttagctcagaaatctaattaatttaggataatttaaggtaaatttagtgttaatttagggtaataactggaaattttagctctaacagatggataatagtggttaaaagtaccatggtacagtgctggagtacataattaatcctaattttctatactaattaacaacattttaaagcaaaataaaagcatttttatgactaaaacatcaataggaatgtgttagaattgtttaatttaatttccggaatagtcgaaaatttttcatttttcaggaacccaaatgtcacttttgggtccgggccatttggccaaaattcaaaatttttatttttaactaatttcaacccaaatcaacaaattaatcattgttgagaatcagaaaattattataaagtgggaattaactgtgtaacggtgctacagtacagcttgacacggcccagacaataccctcagtaccctaactatatacccatactattactatactattactattagtatactataaatgtatgtattagtaaatatggttagtggaattgagtaattaatgagtagagggagagggagctgtgtaataaatgtgtgagcgttagcaagcaccgtaacggcgtaacttacttgaaatgtgccgtggagataatactattaatcagcaaatgatactttgtagacaccaaattcgggaatatcaatcctacaccaataattaactaatatcttagtgtaaatgaactgagtagtatagtgcctggacagtcgcataggataatgtcagaattcttgagtggtagtgtttgaatgtgtttagttttcccaggttgtgttcctacacatgtcctggtactctccattaaacagtttatcagtgaactcttgccaacgttcggatatcccacaaacccaaccacgtacttctcttccacgtcaacactcactctcttataatactttatcctctccaataataactcaacattatatatcctactgtccaaatcggggtactcagttatggaacaggtgttgacactactgacactgttgacactgttgacagtgttggaatttgaatttagggtagaaaagaacaggtaatcaacgccctgaaggggattaaacaggtgtaaaaatgagtaactaagttgaaacttgtgatttgaagtagtgagcccacttggtccttaagtcctcagttaagaaatcggccttattcagtaccaatataaactacagaaaatgattaaatatgcttaattaaggggcaaaatatgcgtaattaaggggtaaaatatgactaattaagggtaaaatatgcgtatttaagagataaaaaatgactaaaatagtactaaaatgactaaaaaacacataaataaactctaaaatagaggtaaaaaatgactaaatatgactaaataacccctaaattaagcctaaatatgcttaaaataacactaaaaatagataaaaatagtactaaaaaatgactaaataaagaccaaactaaagataaataagagctaaataacactaaaaatagctgaaaataagaccaaataagaccaaaatagagctaaataacccctaaatatgcataaaatttgactaaaatagctcaaaaatgtgtaaaaatatgcctaaattatgcctaaattatgcctaaaataagaccaaaataaagctaaaaatgggtaaaaatatgcttaaaatagccctaaaatgactaaaatatgcttaaatagtactaaaaatagggtaaaaaagtggaatacgtgtttatgttgattgatttgtttgatataattttcgaggtctttgactctgaagaagagcgggtctcttgcgtctaggatgattagcaccaggtgactccgctcaatcacgcgccacagctgacgccagaactccaagttcttctcatacggcgtcattgtacttttttcacggagttcaacctcactcaaaatactgcgccacttgtaaaagttacgcaactctatccggtcccactcctccacactcaaattctctattcttatcctcttactctcggatattacgtagtttatatatgaagttaccggggtttccgttacggcgtcttccgttacggggttaggttccacgggatctgtactgtccacatcttctccagatcctacactatcccttgtattgctaggagtatccatggtactgtctacagtgtcttcagtgtcttctgtggaatcatctctcagtggcgtttccacatcccctacactatcttcagagtgttgtgaatttagggtaaaattaacccctgcaggagaactcaaactatttacggagttatttctattaatgatacgcctcggggtgtgtacagatttgaccaaatgcccgtgcatgaactggtctacgatcttcttatttctccttttaaagtattttctactgttattcttctctctttctctatttaactttgttatcagtaccttttcctgtgttgtgaagtggtatatcctccggggcacggggatctccgggaactcattttcatcactttgtaaactattttggatactattctgtatacaactgagtaactccgatgtcagggatgtgtttttaacttccctgagcacttttctgttactcaggaattgctccaaattgttcagtttcccaatgatatactcgtccaaatcattcctctcatacacagaattctcttttctaacgagaatactattgagagattgcgactgctgacggtatagaatgtcatgagctaacgtacgacctatggtaccatgcttcccgcccttctgtgacttaccaccgcccatactcaacacatactaatctgttttatgttattatagtaggagtagtattagagtaaagggagggagattaggggagagggagcgagatttggaaattttgaaaaatttaaaaatatttaaaataatttaaaatttttaaaataatttaaaatatttaaaataaataaaattttgaaaatgtgaaaatataaaattgaattaatataacgtcaccacagattccaccggcacattatccactagtataaatatttgtatgggatttagtgtgacttgtaagtttgtgagtttgggtttgcggactcgcgtttttcgtaaattccggggacagccgaataaatcctatgactggatcaggtattccgttacggtgcttgtacccactcagttatccagttattcccccaattattctctcaccaactcgttaattacttaattacttaattacttagttataccatgggagttagggctttatattttctgattaccctgggaaaataatattgtagaaacaatgtggacaaattaataaggaacgggaggctagaattaaccctaccaagagccaaagaattacaacaatacgtcgaagaactcatttatcacgccaaaatacgtaatcactcaattacacaatcactcaattatacaatttgttaaatatataattagttaaatacgtaataacttaaatacgtagttagttaaatatataattagttaaatatataattagttaaatatataattagttaaatatataattaactttgtgaaattgttagatactgaggactcagatttgttggtggagagtgtgataagaacgccagagtgtcgaagtttattatatgaaaaatatgttcctctctataaagaccgacagttcttcttcacccgcgttgttaatcaatacaaactcagacaaagagattcagctccattagcatatatagaacttgttaacacgtacgttacggtgcttgcatacgcttatctatgtagtttctacagatagccaccccaatgggactctctttgtccctcggttactagttcctcatatctatactagttatttacacatccccattattttacaatttgcaacctttttgatatttattttacatttgttaattgttttttggtaaatgtgtagttactgcagcagattagatagttattttcctcggtaaatcgtaacccgatcaacttttgcattttatttttttaacccccaattaacataaattattgttaattttgatcaatttagttaattaccagttgatagtaccaattacgtaataataatttctgtagagagaacgagatatatcctgcgaaacctgtgggaattgacaagttaaatcacattctaaacctcatgaaatcaacccgaagagattatcgcaaatatcataacgtatcactacacatttcttacacattcttacacatttacacatttttacacattttttacacactaatgtgtcttttttacacattttttacacatttacatagttaataatatacgtaaaaagtaaatagtaataaatgagtagtacggtaggaaaatgggactaattgacaaagatggaaatttaataaataaaatacaaatcaacacaaaacccgtaaacacaattaattaattaattaatatttagtggtatgaggagggaaatattgagacggtggacgaaacaagtttatccgatgaaaaggtgagaagaagactagaaatgatacgtaaagttgaggttgtaaatggtaaagtcattgaacccttcaacacactttatcaaccaaacaccgccacagttaaaaaaacactcagattcaatccataaccttttaatactaatttttatatactaatttattattatatttattatatttatttttatatttattatatatatttttatttatactgtcgggttcacaaatttatttatttaaattgttaaatttattttaaatgatgaaaattttaataataaaataaatcaatgttgagagggatattggaaagtattttgggtaatgtgtatgcggaaggtccgttgttggacagtgatttggagcgttctagggagcgttacccaatccctaagaaatacttggacaaccccgaacttatcccgaagtattactcatttcagtccaatttagtcacggacgaagatttacagcctggaatgttacgtcagctggaagtagacaaacgactcacattgcctacaagaactcatataagatttttagtaactgctactgatgttttacactcctggtcagtgccgtcactgggtattaaagtggacgctgttcccggaagactaacgaggattaacacttttatcctaagggaaggcgttttctacggccagtgcagtgaaatgtgcggtactttacacggcttcatgcccatcgtagtcgaggcagtttcacccgaaaagtacgcagaacacgctaaaaaatattatcaagactaatttatacactttttatacacttttatacagttcatttgtgtgttcttaggggttaattatgtgctaattagtattatttagaggttaatttagtagtatttagaggttatttagagctattttacacattttgagcataatttagagctattttacacattttgagcataatttagagctaatttatagcttatttaggcataatttagagcttatttagagtattttaaccatattttagtgttatttaaaggtaatttaggcgtaatttaggcctattttaggttaattttagtagtattttagaggttttttagaggtatttagaggtattttaggccttatctagggttatttagaggtaatttagggttaatttatctatattttaggcttatttcagtactaatttagaggtatttaggtgttaattagagctattttacacattttaagcatattttagaggttatttagggttttaatgccttagaattacctatatattatactctatatactatacatatactatactatatactatatatactatatattatatatgtgtatagtagtatgagtatattagggtaaggttaatgttgtttgtatgtggaattccctttggatattagggatatttgcccgttggagagtttaaatctcttgacggttttatctctaaagtataaattaactttattttcgagtatttggagtatgagaaagtccagttctgtgatcacgcccttctctctagatgcccaaatttcctgctctttatacattatcctatgacaagctgcgtaaggtttaacgtaaagttgaaatttagtgaaatgagtaataatatttggatatctgatctcatcgccacgcctgtcaatcatcctcaaagtgcccaaatttaacgttttcccagttatctcctgccaattatccatacaactgaagaaatgaattgtatagtttctcttttgtcccaagaggtatttaactccaggaccatcaaataatattaccctcactataggctcgtcatagttgtcagttgaccaaatcaacctcttatccatactattagtaggtttatccatactattggtgggtttatccacagtattcggggtgttatcagtggtgttagaggatttatcagtggttttatctggtgagttatgttttttgaaaagagaattatatttttcagtgagagatctcgtgtgtttttgtagaaaattgtacttttcatccagagatttggggatcttatacgataaatctgtggatttatcccttagattctcgttattttccagaacagtgagctttttatctatagaactaagcgtttgatcgatgaaatttagtgtctcatctatcgatttaagcgtttcgtccagactaatagtggcttcttcagtacctgaggattctacagtagctccctcactaccagaaatctgatccttatgagtggattctatgatattagtaatgccaaaccctagcccgcatgtgtattcgatatacttatcactttttcggtatacaattccttttttaggttttcttattgtaatgtccaattctacaaatgtggcatcgtcttcagaatctgttgatctttcaacagattcttcatatgtttttctatcactttcttccaacacattttcatcttgagcttgactagaagattccagaaacgcttgaacgggatcaacataggaatcaattgacatgtcaatgttattgacaaattcgtaatattccggaaactcatatttaaacggtcttttacacattaatcctgatctgacaactctagcaactccctccattttatcattcacgagcttaatatttcttatatttgactctagagttatttttatcgaactttggaactggatactaatgctattttccagaagattgtactgtaaattccgggccagtttagggccaaacctttccctccatttctcatcaaaattaaagtccagcacatacttaaaatgattcaaatacacaacataacttttactcagctgttctatagattttagatcatttttatcttcaaaatagaattttagttctctcatgttaaatctatgtttcgtcatgttactccagagcttccccctgttatcccagacaaataacgtaaaattgtaatttttatgcaaaattgccatgtacttcattgacaaatatgcacacactgagacttcatacgccatcaacaacgtgttatcagtttcccaaattacatcaaccacacgcgtgtcaggattggactcaatgactttgttgattagtaacactgtgacaggtttgtagtcgaggaatttctttattaacccttgaccatcttgcatcagctcatggctgcttgagtgttgcacaacgtattttgccgtgtcaacattcttgtaattacttatgtcaactgttagattcttcaactcaacccattggaagttaattttctcaattctcttgaagtcgccgttgattagaaacagtgagaccgcagtgatttcactgcactgggtgtattttatcactctgctaacgcgttcactaatcttattagccttgtaaatgagcttaaaactgtgtttgaggggatacttttcgacaattttatcaaaggcaaatccttcccttgcaatgtattcctgggagttttcccggtcaaaatgctcaaaaacactcgtggaatgctcaaatctcaagtccaacaccaccggcacaaaacgggactcgaaatttccaaatttcgggttcaaaaatccgttgtccagacattttcccagccttaaaatctgttacataattaataatttaattatttacttacacataatattattagtatcagctgcgccaactccatcctacacacagaaatattaattttaccgtgtcaaataagtttaagataataataaaattagttatttagagtaaaagttgatgtttttgagtaataaaattaaagtattaatggtttgggaaagtgatttcacgtgtgcagaaccttgcgcccagtcccagacattaacatattttttacccttaaatatacattaattagctgttaaattacttaaattaatgccttaaaatagttaattaatagtattaagagatgctttactaagggtttatgacaattggctagctaaattgacgtgtcctgatagaactaactgagttataaataatattgttaaaaatgtattggcaagtgattcagtttggatatccgcaatttcttgccattatgagaaatggtaaaccatttgtaataagaaaaaatggtttacacgagccttggtacagtgtcactcatctcagatatgacattgccaaattacttttcacagatgttgatggcagagattacaattacctccagtgtgacgtagaattgtatgaattaattgtcgtaactgagtttaagtttaagtgtaggaaggtctggtttgacggcaaactttgctggagactaccgtccgatgctaaggaatttcctaaatatttggcatttcacctgagatataatcaaatgtatcttatgttctctaaattaaggatggagagactggatttggagaatcctcaggtcgatgatggtgagattgaacgtcctgtgtctctaaaaagaagagttcaaaatgataatagaatagttaacaaggctaaaaaacctcgtaaaaatgagttaattccggttcaaaatgctatagagcccagtatagaggaggttgacggtggctccaccagcctcaatatacccaggcttgagcctatagagcagcaatctgaaaattgttcaatacctcaagaaatgacattagaaagttctaatttacctaatattgttattagaattgaattactgggaaagaatgacagggacatactaaggttgttccaggaaaactggcacaaaattatcttatgcaatggatataattcgacttctaataataacatttaccgttacaagcttgataaaaagttcctgagcaagaggtttagaaggaattgtgttagagaacttattgaatcaattgacttctacagggaacagaagattttagtcttcggaactcccaccaaattctctgtgtacaggctggaaaacaacaagtggaccgaggaacactatgttattccaccgataaaactgtgcagaaggggaaattccagtggatctgctacattgtccagtgaccaatacagtatcgagttaaccatggtaggaggtatacattttgtgtttagagtaaaagagggtatgaaatgtgtcgaggtaaagttcggagatcgtcctgtatggaggaataataataaaaacccaaactttatcaggactttggtgtacagtttgacagatggcagcatgttggtggagagtaacagatttgttaagtgtacaaaggtgaataataaatggattaatgagtctcaaaagccttggtatttaaggcattacgctgaggacctgggtgggttaattccaatttacatggacagtgtgattcaaggaaatggacaaaagttcttacttgactatcaaaatgtagaatttgaccttgttaagtaccgtgaaaatgttatttggaggcgtaatccaggtcagtcaattcccgaaactgtaaaatgttactttggatatgccatcagactacatctccaatttcagcataaatttacttattacgtactgaaaagagatgagcttactgaggaacactatccaattccaccaatcagactactcagtgaatacgagggtaacactagagaactaagttccgaagattatagtgtacaacttagtgtcaggggtgatgttaaaattgtttatactctcacaaatggagtgtgtacccttgttaaatatgctgatagagtaatttggagttgtagaactggtgaggaaccactccatgtagtttacgccatagatagtggaagaattgaaattatttttgaggataaaatccttttactctattcaaaaaatcccaactctattgtacaaaccatcgaaattccgcctgaacttaccttgcacaagagaaatgaactgggagaaactgtacaactcagtcctctagagtacagagtccagttatgttataaatctggattgagatacacgcctaacgatgacattatttgtactgaacttagacacaatgggacagtagtctggaactacactgaaggagaaccccaacccctatcattcatttaccaccttaaaaatttgagaatttccgtaaagctccactataaaccttcgctacagtatcaactccaacacaaccaatggatccttaccacacacaacaacaattaatctaatcactcagtatactatacacatactatatacactatagtatattatatatagtatattatatatagtatattatatatagtatagtatagtatatgtagtatagttaaagtagctccctctaggggtatatatttaagtatagttatacagtattagaggtatagtattataggtatagtattataggtataggtgttacgtgtctgggtttacgtattactaacactatagtaacatagtatattagcatatatattattagctccctctcccttacctagttcctctgtattattagctccctctcggggtatgtaattaagtagctccctctcccttatatattaagatagctccctctaggggtatattattagctccctctaggggtatattattagctccctctaggggtattatagttatatagttaagtatctccctctaggggtattatagttatatagttaattagctccctattggggtatatagtattaggtattaggtatatactaaagtagctccctctcggggtatataattctaagtatatagttaattagctccctctcggggtatacagttaacgtatgatattaagttttacagggaaactccgcgttacaaaccgcctcaaattgctcctaaacccaatccactcagccccaaaatacataaatatatcaactaaataccttcattgtgtgattgaagaaggataaattggctatggtatgacatggcccggtgtaaccctcaggcgctatacagtccctcccaactacaacatcataacactccatcaattacccagcctccattcctacacatttttacacacttattcaatcacctctggacatctcacgtcataattcttcatacaattctacgacaatattaactcaataattacttagtaatcattactttgcacgtgaattgagtgttacacttgattgaccacagtattttctgtgttaattccatctcctcagggatttccacacagtttcctaaaccataagattattgtagtgatggaattacccctgtaagcacctgttggaacgcaggaattatcaattttaacccagttcttcggacatttagtcatgtccctaacacataattctgttcctcccctatacaattactcttaggtgggaaattaaggtaaagttagggaaacgctaggatatgatcgggctggaaaaataactggaaaatacaattttaataccatttgacgtggcactgatgttgtagaattgatttatctttgatattattggcggtgataatatgtttggagcaggggccgtggtatgacaaaggcgcttcacatatctcaggcgttacataactcatactccagcctaattgctatagaaattgtgtaaaaaattacccttgggacataaatcactaaaaaaaaatttacacacctgaaacttacacattctccacaacttccaatgataatattattaaacttattattcccaattttttcattaaaaattttattttacctttaattatggaatttgtggtgtcgttaatataattttttcgtagtaattattttaaattaattatatttaataaattgatcatatgtaattataattaattatatttgataaattaattattttaatggactgggagaacttggaggagttgttggagttgatagttgtaaaaaatttcaaggtggtattaattcaatgcagtgatacaaacgagtccattagactttgtgacgttttacaggaaaaattcaattcacaaaaggataaacaattttttatcctcggtgacgttctcacaggcaattgctgccctgatcttatcgcatccaatagattccaaaccggtaacacacatacttctatcccttaccccattctattcagtttttgcaacctttttgacaattatttacaatttgtaattattttttggtaaatgtgttgttgaagcagcagaaattgatttacggagaaaatttatttccgtaacccgatcaacttttgcaattatttccaaaatccataaatttctaattatttttcgataaaaatgatagattgtgtaattaagtgtttagactagtgaaaaaatgtgtttgtagattgtatagtgtacattggcgagagttgtcattttgagctggaaactcaattttacattttttttctccgttacaaactttctattgacttttctaatctcaaatctaaggtattgtttactctagaattaatttttaggttgaggagttggtacagaaggttagatttgaaagtgttatatttctataccacaactccttacatcacttactacagccaatctcacaactgtttctcaatcacaacatcaaatttctcacacataacaacgtcccacgtgacaccactgccatcagactgttgaacagaaatttattccaacttacctcatcaactgatcctgtgactactgttactgagttaccagaccctaacagtactttactactgtataccacagtagaaacagatgacagagtactacagagtttagccctggagtaccctcacaacacttaccaaatcaccattaacactggattatcccatgataacccagagataaagctaagtaatgtaaatgaacagtgtgagcggatccgtctgaagcgctacgcaatggtagaaaaggtaaagcaaactaaactatttggcataataacattgaccaaatgtcttaaaggtagtaacaccctgagaactctgttacaccgtgtgatagagttgagaggaggcaagagtgtgcaattttctatgaacaatttaacggagaataaactttacaacttcccacaagtcgaattattcattcttttatcctgtaactatagtttccctatagggactgagttgaggaagttaattgtgttaccctatgaagtgctagtaggacttaatattgtaccctggggcactccgtacatcttcagtttcactcgaatcaacacaatcctgtcagaatatctccaggaacataataatgacacagttgacacaggggagagtgaggatagagaggagttacgtacaggtgtgggtatgagtttgatggagcgttatgagaatttgtatgatcacatcttgagtaatgatcgtcgcagttttagaggcgtggaaccccaatttagcgctacacccgtagtcctaaaagggtcacacggtgtcccaacatcttacctacacgaatttcataattttatctaatctcttaattattatattttaattattttaattattatttgaatgttcctgaggagtttgggattattttgtaggtttaataaatttcaccatgtgtcaaaatttaccggaagattcctcaatacacatcgtaactaacaactttattattatttttaggcataaaccaggctaatactactactaataataatattagtagtgtgagaagagatttggtggagagtgatgggatattgaggggagtccattttagtgagcagaataggggaaaatttgtgccacatccttttaatcgcagattcgcattctcaaaacggcctcttttcccaatcgaacccaggaatctcagaatatacgtatgattcacacagattcctcatacctacacagttatccccattatttacacattttgcaacctttttgacaattatttacaatttgtaattattttttggtaaatgtgttattgaagcagcagaaattgatttacggagaaaatttatttttcgtaacccgatcaacttttgacaatttacacatttacccaaattttacacaaattattgttaattttgatgaatttagttaatatttgtgtaacaatgggattagggattactgagacgtaagaggagaggagtgggtaaaaagtgtaatagccgaggaatcaggcataaacataaaaagaaacgtggcagtaaaccgaacagtagaacctttgaaggcggtcaaactcctctctacaaacgccttcccaaattccccgaatccattctacaaccgtatcccccgcccactcttttctttttaccccttttaccctttatttagttattttaccctttatttacccttaattatgcctattttacctatttttagccttattttagtgttattttagccttttatttcttattttacaccttaattatgcttattttaccctttatttactttattattatgtaaaatgatgcagatttgatcctaagtatgacgtgttgaatttgtgtaagttgaggtattttattgagcgtggccggttggacgtgcggtttcctatcactcagcgacacttacacgactccaaatgcgtcaaagttaaacacggcgttcatcttttcaacgtggtgcgttacggtgcttgcatccgctcacacagctccctcatctcccccagctccctccggggactcttttctttacacacttatagaatttcatagttaactcagttagaatagtacagtgaaatatgtatatcccatgtgaatgccaaagtcaagcgacaattggcccggatagtagtgaggcgggggactgccacggggagctatttaccgaactatagtaaatattaattgtagaatggatatccgtttccgtataagattgacattagtgtggcgagttgtgatcagtcaagtgttgatgttatcaaagccgttggtggcactgtcaccatcattcatcacgataaagtctctctcagagcacacattaaaccacacaaattcgaaatcctaccacgaaccgtatctacactactactttttatactccttactactttttatactccttaccacttagttatacacatcactacttacttacatagttaattggtgataaaagtgtgtagagtaggcctgatatacgtcgtgtgtatgaattggagaagtttaggttaatgggatgtaatgttgtgtatattaaaccactctggctcatacaagaagaacaaaaaatcatacaacaactccaagaactacaacgtaactctagaattatatacttagataagttagaatagagcaattggtatgataatatcccttatgaaaaccaatgtcaagcgggaactggcccggatagtagtagggtgggggactgccatagggagctatttacctatcactacagtttactacaaaataaatagttattgagttagaatagtggagtgagtatagtaaatccagggtgaaaaccaaagtcaagcgggaattggcccggatagtagtgaggcgggggactgccaaggggagctaattatacataactaataccataaaactaacattgtattagaatttggcactgaagattacgacgaaataattaccaaataccgccaaaaactcattcaacaacatcttaacacgtaaataacacgtaaacacgtaaatttgtaatgagtatacaaattatgttgagtatcaaattttaaggcaagtattgtgtagtagttgatattcggtagtttcctgtcttcttagtatgagttcatgtgacttatcccgttctgacctgtaaaacttaataaacgaccagcaaactaggcaaaacagtgagctcaaaatctgctccattaacattctatttcgtttattcttcagttgattagtgaaaataacgcgaaacgccgtggtaattccgttaaattgttggatggaatccagtagagagtggaatgataggaagagagaagtgtaaaaaataacatcccagaagaagggaatgtatctgtaaaggttaaggaccaacaacaccttggaatatatgtaaaaaatgtgatacggcgttgtttttaaaccgtaaaataaacatatcaaaaaaccaaccacattatacacattcaacaccctcatctccacattatacaccaattttatatattataatatatattgtaatgataaataatggtatgaatttgtacgtattttggaaaaaagataaaagtgaaaattggatatcattttttagcccaatttaaaaaattaattaatttacaatattagaatattatttccattttaacattaattttatttaatttgatgatacgatttggggaatttgtggactgagcggagttatggagtcccaggagtcggagctgtactgtccgatttatttggacattgacatgagctttgaaggcacactaagctccgtcaagaaaaacctcgaaaacaactcactctccaaaaaaaccaaagccatggaagatatcctactcagtaattctctacaccctttcaacttatttattaaattatataattaaataatataattaatgtgaattaagttaaaattgtgattagtgcacttgaggggtatggatgtatcgagtttgtttatggacataataaggtttgctgtgccgagtactgaccaccgcatgaaacggcttgtttacctcttctttcaaaccttcaacatgtgcaaaaaagacggcacacctcgcgatgaagttattcttgtatggtatccgttacggggcttgctaccgcttatttatgtagtttccacagagttagccaccccaatggctctctctttgtccccctggaaactcagttatctccttagttataccttagttaccttaccccaccaattacagtttttgcaacctttttgacatttattttactatttacaattattttttggtaaataagtggttacagcagcagaaatgactgggtgagaaaatttatttctcctaacccgatcaactttggcaattatttccaaaattacaaaattttaaataatttttaaataaaataaatattttagtaacggattgagaaatgacttgtgttctccgaatgaatatgtcagaggctctgtcttacgtttattatcaaatctcaccattttcaacattattcaacccctcataccctccatcatctccaacgtggtatctactcaattctattatttatactgttaacagtgtaaattgatggtgtaggagcacagagagccttatgtgtatcgtaatgcgctgttatgcctgacgaacatctccgagcgcttcggctcagacctcgtcacatcctccttcaaaacagtcgaaaatttcatcacatccgtattaactcacttagttattcagttattcactttagttacacaattagttatgtggttatgtggttatgtggtgctaatgtgattgtagtgtgacgatgtgtttggaactgtgagagcttacaagttacttgaaagctgtaatctcgatctctgcattcagttcattctcgccattgaatgtaatttactcactattatatagattttacccagtaaattttaccccgactccccagaattcgtagctatcacctcttactcaactttatactctagtaatttagaatactcttactctagtaatttagaatactcttactatagttatttagaatacttatggtatagtaaaaaagtgttcgactccccagaattcgtagttatgatagtttacttaattatatacataattttatgtcgactccccagaattcgtagttaagagagtttactcaactatatacctaattatacactaatgattgtattagcaaacttgttgagtttgtcgccgttgatacatttgtcgattttgggatcgtttgagaagttgtcgagtgtgaatgaccagatcgcgcagatgatgatgcgaattctcacgttactactgcagttctccaataacaattccgttcttttctactcctccaacctccttctcaaatacaaccatcaactcaccagtattaccagtattagttattatagttagtgattattttgcttcctttatgctgctgttttcccgcactcttgggatttttttgactaaatcatccataaattagcctatttttagctataaattagcctattttacgcctaaattagctataaattagctataaactacgtaaaataacgtataactaactgtgtatgtgtagatatggaggatttgggtatatgttgtaagtgtttgataaaggtgttgttgaatgagagtgacttgaatgtgaagatgttagtgttggacaagctgcggatgatccaccgttcctcccaaaacatcctcgaaaactttgttaacgaccttttaaaaggtctaagtgtgactaatctgatgatcactaggaaaatcctatccctcgtgctcagtgtgtgtaacaagtcaaatatcaacactatactcgaaaacttactacgtaactttgttaaggaacttaattactcttgtgatattatcacacagtacagatccacattgctgcagtgcctgtttcagctgacacactctttcgcaccacagttactctccgttttcactgaccttttaccatttctaaactccactgaagttatctccactcagatttctcttcttctctatcataccattagggggtttacgagggggaatattcggaatattggggggaacactgtagaaaatagtgtagaaaaagtgttgagtgagttggtaatagcggtggacggcataaagtataaggaggtgttgattaactgtttatacatcattggtgaatattccactcagttctcttttatcaacaagtgttatcaaatattgactgagtcacctgtggaaactgctgctgcagatgctgcagcgggagtagtgagtgtaatattggaggacgggagttacagtagtaagtatagtaataaagagcacagtgacgggtttaataagctgttactacaccataaagatatcctcctctacaacactctcagcaccacaattctcaaactcatacataaactcacacgtacacttatttacaaattaactaagctaaatagtatttagatagtttacacagctaaacagtatttacacagttaaatagtatttagatagttaaacagtagatagagttagttaacttgctgcttctatgttgcagttttcttaactaataataatggtagtggacgaggagatggtgagatatgtgtctagatcatgtgtgatagtgataaggttgatggagttgttggataataatgtgtaccacacgaagcggctgaagatggtgctgacactgctcctggggctgctaaaggacactcaaaaatacaccaaacttgtacaaacctatctcatactcacttgtcaaccttttaatacacattctgaggacaggagtaattgtgacaaatttgatgttgaaatgtgtctaaacgatttctttcccacgcaacaaaaggaacaagaagatgaagaacttaaactactcaatgacctatccaactatcataaaatacatcagttcacttcattaactgtatgtttccgttacggagcttgtactcacactagttatgtagctacagagttagccaccccgatgggactctctttgtcccaggagtactagttatccctccgggggtactagttcctcatatatactagttacttatttacctatccccattctattcagtttttgcaactcttttggtatttattttacatttgataattattttttggtaaatgtgtagttactgcagcagaaattgcgggagtggaaaatttatttctcgtaacccgatcaacttttgcattttatttttaaaataggatttttgtaattatttttcaccaattttgaccaaattattttacacaattttacaataattatctattaaccctgacactaaaatatgtgtaggaccccctgtacgtcgagggttatataaagttaattggtaataaattatattttaacatgttaattgagaataaaagtactgaggtgttgcagaatatcacattggatttatctaccggcactcacatgcaactggctacgagtaggaagttaataactttgtctccccgtcaacaggttaaaacgcaagttaagtttagaattgactcgtctactgatgaaactgtctacggctacgtttattattccacctccagtactattctcttacaatgcctcagctttaatcctatacacatttccctgtacgattttatccagagaaataagatctccggggcccagtttagaaccttttggaacgattttcaatgggaaaatgttatcaaactctgtgacgtacgggtgactcccacacaattattgaactcactactgaactatacgcacatgagcataatcacagatgacacagagtttgggatttccacagatttgtccacagaagaggaacgagttgaagaggatttaggggagattgggatgaaattgttaaacgagtcatttctctccattaacctcttcctcaagaccattttcggtactcttcccacttctttatataattatttagttattttacgaaataattgattttaaaaataaagttaaaagttgatcgggctacgaattcccgaggaaaataactatcaattattgctgctcataactaatactatttacacctattatacaataacaatgtgtgatattgtgttagatgaggaggcgatagcgaacttgagcctggtcaagagaccaaacaacacctactccggatgcttcagaatcagatcacgcgaacaagtatcacacacccatttaccaatattaactatattattatattaattatattattatgtaaattgtgtaaactatgtggatagaatctggcggttggacttggggacaggatagcgatggtgactcgtgaaattgccatataaattaatattattttatatttattaatgattttgagaaaagtttccagttgctccgtcggcgtcagtaatttcggcaaattactcaaaccaaccaccaaatcacacaaagtcaaactctaccacgtattctcccacttatacattattatatagttaattatatatataataatgtatataatagtataataatagtataataatgatgatgggtagatgtcaggggagctgtgtgagatatggaatgagcggcttgagatattgatgaaaatgagtaacaaattcatccccgaacccttcaccaaaccaatcgtcaaatacaattcagataatcaaatcatcaactcacttctctatcactcccataactcccctaattccactaactcccctaattccactaactcccctaattccactaactcccctaattccactaactatagagattccactaactatagagattccccaaactatagagattccccaaattatagagattcccctaactatggagatactatagtggattctaaggttagggaaatagtaaagagtatagaggaggagttggacgtgttgatgggagtggactgtgggataatattgaagtgtttgagtaaactgaagattacaaatgcaaatttgataatcaaactgtgtaccaaagtgttgtccagacacgaacccctcagcaaattcgctctcctttactccttacaatcgctcaccaacttattacacaatttactacacagtgaagatcttactgaagatcacactgaaatacttactgagtcacaaaatgagtcacaacttcagactgtaaaaaagttgttgaaccggagtttggatgtgttggagaagaacttggacagttttgagctcagtttggttgctaaaatcgttaatatcatcaccaaacccaatgtgaaacacgcactagactcctcctcaacactcagaataatatccaaatacataactgaaaagtacttaactgacaaatacttaactgtgaacaatgagttaacgcctgtggtggtgtattatttggtgagtgggtttgggcgtagttctgtgatggataaaaagttgtttgacggtttaaaaaatgtcattactcttcagtgtagtaattactcacttgacattctcaccttcatcgccaattctttttccaagtttatctccaattgtgatagtagtaatagtgtgggcggtcccccgcctcactactatccgggccaatccccgcttgactttgactttcacacggattatacccactccaactgctccatcactgatcataattcaccaccaaattcatgtgactcagtaatcaaaaatgacacagtaaacaatggtgacacagtaaatcaggatacttcatatgtgagaatgtattgtgtgttggggtgtgagatagtaaagagatcttcggagttgagtccgttgcatgtttcggttgtgtcgaatgcgtattccaaagtgttaatttgtcatgagcatttgttcaaggttttgctggaaaagtttgaggaactgttctactccttcgaacccagacaagtcgccatggtcctacactccatcaccaaactacactacaaacacacttctcctcacttgttcaccatagcattggaagtatttccccactatttaccacttaattacgtagttatttagatacttagttacgtagttaaggagttagggagtgtattgtgttgtaggatttgtggcggtatgactggcagagtttgacaatgttataccagtcctatgtgaaaagtgattacataaccgagagtacaacccagagattcgttcgacacatacaccagaggattgagacacatcggatgagtgacatacaccagaggattgagacgagtgttaatatgaataagacggcgttgttgtcactgatttactctttggtcaagtccaatcacatggacacagagttgatattactcttgtctgaggtacggaattagtcagtaaattgtttgtagcgcatagagcagcgaattgaggaatactccggagacgaagtcattaacttaatttactcattctgcaaagtctaccaacatgcaaaagttgttccccatgcaaaaattgttggacattccaaagttattgggcatgggaagttgttggaagtgtcggaaaaagcgttggaaaagttactcgtaaagttgggtggattcacggagataacagcgtttacggtaagttgatatggatgataatgtgtgttagttggtgaaggtgttgaaggtgtttggtgaaatcagatatgttcctgctgcagacacagttttaaggctaattaagcataatttacacactctcaaccgcctgtcacacacacaaattaactctacagtaccacacacacagttataattagtcatacaattgattgtgagtgtaaaatgctgtagattcgatcgctggggatgctgggcgtgaacgatattgatgtgattacagttttaaacacacttaaacactcaaagaaacatacataatcactaatttaatacttaactatataatatatacccctagagggagctaattaactatataactataatactactatactattactataatactactatactattactatacttaaatatatacccctagagggagctactttactacatacccctagagggagctatcttagtatatacctataccttaactactataccatactatatacttatattacttaactatactatattactatatatatatattatgtatatgtatagtattaggagtataataggttatattatatacctaggtgtatactaagataacacttatttcagcactaaataccaattactactccttaataaagtcactaaacactgtaaatagtataatagagttgttataccctgtgtaatatacacctaatttactacccgtaaacccagacacgcaataccatatactatatataatatatactatagtattatacctagaatactcttaactgtagtactgtactacagtaatactatccaccagtactatcctactattacccaagaccactcctaactacctaaccatttactctttatactgttaatacttaatatactcttaaacccagacacataatactatacccttatactaccaatactatacccattatactatactatactacatactgcatactatataatatactatataatatatagtataaaatattaaaggggtagaatggtgatgttaccaaaggtaacgtttcctgtggttatgtaaatccctgataaaaattagattagcaatagtatacccatggatccggttaactgtgttggtaaattctccttcacaaagacctcctcgccgtcaatcatcgcccgaaccactctacacatagtttaattaagtatttggtaccccccggaaccatcatccgacacctccaataaatgattcaatcccacttctattcctctctaatcattattacagaagttatatagattagaagttaacagggtaactagtgagtagactgagtagactgagtagacagagtagacagagtagacagagtagacaatacgtgaggaatttcgaggagtgtgagggtatgattgaatttgagtaacttgagtgaaatggtctttgttacagagttcagttcgattagtgtcttatcaggcccattacatcttatcatcaaaccgccaatactgttctcaccctatcattcacatagtcaatagtatataaatagtatgtaaatagtatgtaaataatatgtaaattacaggggtaaagagagaccgatagggagctactttactatataccccaagagggagctattttactatatacctagaattatatacccctagagggagctacttaaatatgtaaggggaaagggagctgtgtgattgcaagctccgttacggagaaaggtcccccagggttaaataactgcaaaactaggacccccagagggagataactaagaagataggggaaaaagagtcccattggtgtggctaactaagtgtatataactggtgccgttggacctgacaccgtaacggaccatctgaacatagcatttgaatgtcaattgattgcaaaagttcttgagagtaatgaactggaaagaatcggcaggcctactccttgttaaacacgttaagttattctcacttaacattaaccaatcttccgtcccaacaaagtcactacacatctctacacatctctacacattagtaactaagtaactgagtaactaaataactaagtaattagggtaaatagagtgaatagagtgaagagtacttaagagaggtgttggagtaggtgttgcagtattgttgtgagagtggcgatgacggtggtggagcttgattttgcgcctgatttaccgtaggctttgaacattccgggaagaaaaaggcactacaacattgtcacacagtaattatataattatgtcattttagtgaaaaataattgttaaaaatgggattttggaaataaatgccaaagttgatcgggttaggagaaataaattttctcaccccgaattattgctgcagtaactacacatttaccaaaaaataattgtaaaaagtaaaataaataccaaaaaggttgcaaattggtaaataatggggttgtgtaactaagaactgagtaataggggataacttacaagaacatgcatttccagctgtcatgtatgtctttttcaccattattcccattgttcccattgttcatattgttcattggttgatactgttgataaggattttgcccaggatactctccaggatattctcctgggtactgatttggatactgatttggatattcccccgtaggatttggtaacactgctggattcgcaggatttggcggtaggtaattaggatttggatacccttcaggcacagattgattctgtaccataggattagaattcggaggattagaattcgcaggactgggattagttgtttgtcccataggatttggtgtcataggctgtggtgcctgggtcacaggctgtggtgacatgttttgactctgtcccatgtcaccccccgtatacccattaccatatcctccatacccattaccatatcctgtgttataccctgtgttaggagtgtctggcgtgttggagctggggtaattattgttttgatcggtgacttcatatttcttcaacttatttccaaacttcattaacacatttttcctcctatccatacctctttttattccaatttcttcagttttaggagtggtattaggagtttccacagtgttgagagtgttgagagtgttgtgagtattgttatgattgcgattgaagaggttaataatatttttatgatatccgagaaacttttgtttttccagtaggattacgttttccaaattcccctgtgtaacgccaagtattacttccaatttacacacttttaaaaggaataacaatttaaaaatactcaaacaaatcattttcaatcaccaaacacactaattttttattattatttttatctattttaaacaacgtcaccacacaaatttttatacaattatacaacaatttatatattattttattaattatttattcaaattattattcaaattattatatataaaataataaaattatatgtaaaataatattttaatgtgtttggatgtggagggattgagtgttgtgtattcgttgatgtattcgttggagtatttggagcggggactgatctccggcgacgttaaattcgaagattacacaaccgaatgcaactctctccttaactcatccaaactcctcaaacaacccaaacattacttccaacaattcgctaacgtaaacttactttattttactcattcacactatttaattctcatactattgtgatttatagtgttatatttggttaggattttgggcttaattttcagttggcgattaatagaatcaacatcggatctccagacaaccataccagccaacaagtaacacatattcttacacgtagtttacacatagttttacacatccccatttatttagtatttgcaacctattggtattttattttacatttgttaattattttttggtaaatgtgtagttactgcagcaaaagtggttagaggagaaaatttatttcccctaacccgatcaattttgacattttatttttaaaatcaattatttttaattattttatgaaaaaatttgatgtaataataattaaatggttgattgtgtgtgtaggacgtgggaatatttgatttgagtggcaacttcatcactctcatcgacgcactcaaattaggaatctcaaactccaatcaggcacacactacactaattatatacttaacacttgataataattgataattatagttgtatgtgatgttgtgtgagatgctgagatcgatagagttgagtgacaaatgctttagtggccccgatttctggccccgttttaagcttgaaaaattaacattttgggaacaaaaattattaacccaagaggaattaacaagcgaacaaaccacacagttcctcagtgatatggaatccacttactacatctacagacaacatctcacacaacactaatattcttactttattttaatttattattttttgttattttttgttattttttgttattttttgttatttgtggtgtttttatgattttacggagttttgggaaatttatggaaattttgtaaatccgtcaatcctgcacaccggtgcggaattagacaaaaaaatgaaaaaattaaaaaatctccaaaataactaaaattccgtaaaataatgtaaataaatgtaaaataattaaatttctgtaaaagatgtaaaatagtgttgaaattgtgatgagatgtggaatcgcattattgttaatttttaattcagtttattctttaccaaattgcagtgaaattaataccatcaaaccttgcatatacaatggacccaaacaaaaggtatctccccctctctttttacccagactccccggaaatcgtagctatcaccatctcattcactttactatcgttaatttttacaccgactccccaaatacagtagctatgatagtttacttaactttactatagtaattatactatagttaataagtgttcgactccccggaattagtagttatgatagtttacttaactctatacctaattttatgtcgactccccggaattcgtagttatgatcatttacataactttaatgaatattttagagaatattcccgcttaaatctttatcgcctaacagtgttgagaggagtgctgagataactgaggagaattggaacaacgtaaccaggggacacatccactttctctatcgctctcaaggcccctacggatctctaggcacatcacaacacaactcccacaattgtaattcctatcacactcacaatagtgttaacactgatgatagtgttaatagtgtgaatagtgtggatggtacgagattaactcctatacgagaacacccgatgaaaaaatgtattccgataccgcatttgaggcatgtgcagtatgtaatgagtataggtgttggaacacctaagcaggagatttacccgataattgacactgggagtacaaacacttgggttatctcggaacagtgcaattctatcacctgttccggtgttcccacttttaatagtaggaaatcctccacattcagtcccgttaacgagggactcaggatccgatttggtaccgggactattaaaggcgttttaggcattgataatgttactattggtcaggacaccattgaaaaacaaatcttcggactcgtcaatgaagaatcctcaaatgtttttaaggtccgttgcggtgcttgctcacacttacttatgtagtttctacagatagccaccccaatgggactctttttgtacccagtagtactagttatccctccgggggtactagttcctcatatatactagttacctatttacgtatccccactatttctcaatttgcaacctttttggtatttattttacatttgttaattattttttggtaaatgagtagttactgcagcagaaattacaattattttcctcgccatttgctaccccgatcaacttttgcatttatttccaaaatcgtgaaatttacaattattttttcataaaattgaccaaaatttacagtagttaattcccttgggttatgtaatgaatttgtaggtaataaaatttcagggtataattgggcttggatttcccaaattagcgtttgaccaccacacctcactctatgacaactactccaaacaaatcaacgcagacctcatcttctctctctacttctccaatcaagtaattatccacacagttaactgtttactcagttaactatttactcagttatgtttactcgtgatttaatcttatttaccctataattttgttgtagtattcgtatgtgatgattggaggagtggatgagcgattttatgtgggtgacttgtatatgttaccggtggttagggaatactattgggagataaagctctatgagctttgggttgggaatgtcaaactctgctgtgacgacgagtcttatgtcattttcgactctgggacttctttcaacaccatgccacatgatcaatttttatactttaaacatatcgtctctcccaagatttgtcatggtgcgttacggggcttgcatccacttagttatttattacttacttatgtagtttctacagagttagccaccccgatgggactctctttgtccccctgttactagttcctcatatctatactagttacttatttaccttaccccactatttacaaatttgcaacctttttggtatttattttacaattgttaattattttttggtaaatgtgtagttactgcagcagaaatgtcatcggagaaaatttatttctcctaacccgatcaattttggcatttatttccaaaatcatgatttttgtaattattttttactaattctgaccaaatattatagtgttggacgatgtgttggaatatcctgtgattcgatatgtgtttgatggtggtgtggagcttaggttagagcctagtgaatacattttcttacataagaacaagtgtcgtattgcttatatgcaaatcgatgttccttccagctacggacgcgcttacattcttggcactcaagccttcatgacacatttttacaccgtctatcaaagagatccggcaatggtgcgttgcggtgtctggtccaacggcaccagttatttattagttatttttccacagagttagccaccccgatggctctctctttgtcccagtgttcatactaacttagttattacagtaatagttatgtaattagctccccatggcagtcccccacctcactactatccgggccaattgtcgcttgactttggcaattcacatgggatccatactactcactccgctatcctaacttagtacagtgttaatattgtgataggttggatttgctagagctgtagattcatcacaattggacccaagcattaaagcactctttaaccgcaattaatctttactcctcactacactattatattcatgtgttgtactaacttagccttatgctcatactcctttcttaccattttagatagtagtttcgttagtaatttatactattaagctaggattggtagggctagcacattcttacacataaagattgaggtggcggtttacaaattaatacacctcaataacactttataaactctaattaactgtttattaacactaataaacagtgtaaacaagtgttaagaagtgtaaaggagtgtaaagtagtggttagtggaggagttaggggtatccagaatcttaatactattagggtttagaacccaaataatctctctattatacattatttaagcttataataatggtattaagtggtattattatactatactaacttactaatacttatcatactaccttatactcccaatactatacattatatacataatatgtatagtatagtatatatagtatagtatagtatatatagtagtatattatgtctaatagattaaacctaaacacctaataactataccaatatagctataatactgtactataatccttaactatataatactatagtatattagtactgtaccatactctttaacccagacacatatcttaactactatactcccaatactatacacaatatacataatatatagtatatgttataggtgtctgggtttacggttagtaaattaggtgtataattactatagtataatgactatattatacattatttaggcttataatagcagtattaaggagtagtaagtgttaaatattactggaatgagtttatcttactgtatacttaactatacaatataccccgtcatactcccactactattcaaataaatagtatagtatattatagtatataatatataatatagtatagtatagtatataaggtatagtatagtaagtgtatggtacattagtttggttgtttgagtagaatgttatggtaagctttttgtatgtaatcttttaaccgatccaacccgaaatttctattcattatcaccaacgtattcaactcacaatatggcgggaccatatccactcctctcacactctcactctcaccaacagtacctgtagtaactttgtctacagtatctccaatattcttgtttacagaatccaaatgtttgtctacggtacctgtagtaactttgtctacagtactcaaatgtttgtctacggtgttaatattgcgtgcggttttatactctgtgaggaagcaattgtagcacttgaacttcttgtccatctcgtacattaagttatacttgtccaaattcaccactgtacaactattcgcactcaagttacccgagccaaccgcagtattcgtcaatcccaccacacacttactccatagtccatttgacccaattgcagcagagtcactattggagttactattggagttactattggagttactagatttaagggagtacgccctgttaacagtgtttatggctctgattttactgttggtgaatgtgaatttgggcccagagacaaaattcctggtggtgattgggcagtcagtgcatctgtgtgtcagtgttttctgtagtctataccgttgtatatgtcttttatatttgtttttctggtccttggcgtttttttccagcagttcgtagttctggccgaacccgtccttggcaccggagcttaccagaatctccagcctgttaaaatacccttcatcgcccttactacgccaaaccctcaggactaaatgtgataagtagtgtaaatcattaatattctcaatttgcttcgagtttgtgtcaaaagagtcgtcaagcaggtgggcgtatttgaagaagttaaacacactaaacaagtgtgacgccgaagtcacatagaaccgggacctgatcttaggattagttatgaagtcacccggtgtatctttcagtgagagattcagcaagtcagtctccagattattagtctccagattattagtctccagattattagtctccagattattagtctccagattattcgtatcgatagatttgttatatttgtagcccaagtcgtgatatgagccacggaccgatctactcgtcctctcatccacacacaactctcccacatgcgaccataaactatacgaattcaatattatcccctgatctatcgggtctactgtatgcatagtgttagtagtgttatcagtaggcactgtaggcacagtaggaactgtgttacaagtgttagtagtgtgtgtgagatgattgtggtagagtagttcggtgtgggattgattgtggaagaggtacatttcggatggtttgagtcctccgatgaagcattttccggcgtcaaagaggaggtcagcgttgagatacgtatttgcgattagtaaacttgtagcagcaatagacgcagcagaagtgtcattttttaacattctatttatcgctctcaattctatcggcctatccacacacacatcctgcgttacggggctagtgtcaccacaattcacagagcttacagtatttacagagttagtatttacagagttattgtggtttacggatttgttattaaaagtgtcccctgtggtaaatgtgttcgaattgtgtatgtcgttatcgtgtgagttgatggattctgtgtataaaaggtgaaatgtaacatcgtgtaatatcttctgcagcaaattccatgcgattgtgacgccaatttctaatttttccctgggtgtcacgccgtactcgcagggtgaaatcaccgaactcagacgctccacaatgttataaatctcaaatccaacctctaacccgtgacccaacaagtaatgcaaatgtatcaaatcatatcttatgttgtcaactatgtcactcaactttgtgtagtcatattccgttacggggttttccgttacggtgtcaggtcccacggcaacagaatttacattactatttactgtatttacagtatttacagtactatttactgtatttacagtattaagagcagcagaattggtaccaagtgcagcattatttactgtactatttactgtatttacagtactatcaactgtattaacagtattaagagcagcagaattggtagtattggtaccctggacactaccctggaaactaccagtgttacctgtgttaccagtgttagtagaagattccacgtgtttgtggaacttgttgagtagtctgttccaccggttgatggtgtggttgattttgtttacaatgtaaaaggtgtagtcgtctacggagtagagtgagttccacattagttcctttttcaggctcctgatatacttcctgataagcccctgtaacatggcgaaatcttcccttttatattctgaatcctgtatcgccttgttatagtaatatctatcatgttctgggatatcccgtagcacttgttcgtacagatctgtcccatgtgcagtaatcaatttgttgagtagaactttacattttaatctctgtggtgatattgtggtgtcgtttaaaagttcgtaggcgcgtttgtttcttatggtcatggtgactaggattggtgtgaggtcaccttcaagttccagaatacccttggtaaatgctgcacttgtaatttgacacctgccctcgtcactactgaaaatcttaaaatcatgcctaaaagtgctgtggagccggattaaaccgctgcagtctgccgggtaaagcgtttccctaaacctgcggcccaagtcctcagcctgcaatttaccaacgtcagtcaagtcccctccccatttggccactattaacaccgagtctaatttcctaactggcctcgcagtgtaagcgtgctcagtttccgaagtgtacgcagaagatttggaacaactgtccgtcatctcatcacacacaccggcaactctgttcacacttcttacagtgttaactctgttcgcattgtttacagtatttacagtatttacagtatttacagtgttaacagtgttaacagagttaacagggttagaagtggtataaaggggtttgaattgtactttgcggttgatgccggagaattcgtagcctttgtcgagcatttttttgagttctctaaagcactcgagttcggtgacgagtgcgttaatttcattatttaagctgtttagctgggcgtaggagttggtgagtgagtcgagctcacgctgtaactcgtccagaaccaacaccacagtctcgtttaacctcaccaactcctcaggagattttaactttatctcacccaacacatttcctacatcatttcaatactataattaagcatattgttagtattataatagttttagtggtaataaaggtgtaaataggggactgggagtgggctgtcagggagtcaagcacatttctatagtaataagtaagtagtaaatttagtattttagatatttagacaggattattttagttgttttagagttataattggggaattttatgtttagttcgttaatttgggggaacttgctaggattttttgggttaaaaatccaattttttaaagtaattttcgaataatttactaatcatttaaaccaaaattatctatttttagggtaattagtagaaaatttagctctaatagctggataatagtggttaaaagtaccgtggtacagtagccaagtacccactattacccaaaattaaacactcaataacagcattttaaaacaaaataaaagcattttgatgactaaaacatcaataggaatgatttgggattaaataatttattcgttaaaaattttggaaaaaaaatttttttgggaacccaaatgtcacttttgggtccagaccatttggccaaaaatcgaaaattttcaaaaatcttaaaacctcaaaatttccacataaatcaacaaatttaacctctcttaacaccagaaaattataattaactctaaattatctgtctacacagtgctacagtacaggttgacatggcgcatacaaacccataccactaccatacacccatactattactataccattactataccattactataccattactatacctctaatactgtataactatacttaaatatataccccgagagggagctactttaactatagtactatactattactatactactactattactatactagatatactatactattactataattaatactatactataattaatacctttgaagtatgctagtatatgtctatttttggtattgaatttgagtttatttttgggtttcctgtctgcgtgtctcatgataaccacaacgctgcagagctcttctctttttttatcatacaaattccttgttttcaaatctgcgaatgtcttctttatcacttcctcgcccactgttctctccttcactatgttcccaatcaccacattatactttgactgtaactttagtaaaagtatgatcctcagaatgttagagcagtctgtgaggtacttttgatttcgcttgacaaatgaccagccgttaacatcgcatacgtagggcccgtcaaaggtccgtagaatgtcaaatccgcatacaatttgtctaaaatggtccacaattctacaggctatggttttctccttgccagttaggattacggggtatcttatctccttgccgtcggggtatctgtcaactttcccatccaacgctggggatttccgagcctcggcatgtgcaaacatgggacccacagcgtaaactttaatatccgtgccaaaggaactgacaaactcctggtagacataagtcgcatcacgacgtacgttgtggatttcaggacagtattcactactacggtcggcaatcttgcggaatagcttcttacagccaccgccggagttgagcggatagtaaatccaattattgtgatcatcagagttgacgggcttctccacaaacggcttatttaatcttatgccgttgtagactatgtagtcgtaatgctcctcgaaggtgtggagaccctgctttaccaactggtggtccacaattatgtaattcggatgcggtatacgacaggcctatatcagttacggtgcttgcacaagagatattgttttacagttaaggttacattatgtagtgttaactatgtaaactggatatgatcaattttatgaaaaaataattgtaaatttcactaaaaaaaataaaatgccaaaattgatcgggttacgaaaataaattttctcacccagtcatttctgctgcttcaaccacttatttaccaaaaaataattacaaaagtaaaataaatatcaaaaaggttgcaaataatgaaataatggggatgtgtaaaactgagtagttagggagataactgtggaacggtgtatacctgaagttcgcggtatatttcaactctagagcgtataattctttgtttttccaagtcattcaatatcacaggattatacaatctcacatactctatcgcctatacaactatttatacaaataataaataaataataaaaattgatattattattgtgataaaatgatataattgtgtgataaaatgatataattgtgtattttaccttttcgaggggaaagttgcgtgagtagaatgcgatgaggcattcgacaacgggccagtttgagggttcctcctccaaaatcatctaaacacatatttaacaattttcttaatttcttaatttagtaaaataattttttaattattaaatgaataatttgataaagttgttacttgttctggaaagacgacgacgacgaaatcgccggaatcttcgagtcgttttaaaattgacctcattggcacattttcaactttactctccatggcacatacgccaaggctaaacttcctcctcatctcaactcacaaaaaatttattactcaaactacacattccacataaaattgtcgtgtaaaatattaatattagtttataaaattattaaaattattaaaattattgtgtgattattgtgtgacgatttttttttcgttgagtcgttggacgtcgttgatgtagagctgaaagagtccgtagttaatcttctcccaagcgcaagaagttaatatattacaaatcatcggcgaagccatctccaaactcacgccccttatcatctacacacactttttcccttatttttgctaattttacgctatttttacacttatttacgattatttatgctaattttagccttaattaggtgttattttatgctaattttatgcttatttacgattatttatgctaattttacacttattttacgataatttatgcttaattaagtgatattttatgctaattttacgattatttatgctaatttatgcttaattaagtgatattttatcgtattttaagccgttacaagggttaaatagtggtctaaattatgtatgggatacgttgattttatattccatggctctcatgaagaggtagtcttgcttgtattttaccagaaactccacgtccaaacactaaatacaattatcacaccaattttcacaatttaactaatatcttattaatttaatcattttaaatgattattagggatttttagggatttttaaattttctctctccaacccctaattatccccctttatccctaattacctctatatactactgtatactactgtataactctataataatgtgtactaataaaactgtgtagaaacatgtttggggttaagggatgagttgatgagttgtgaggagccgagtatgaagggtaggaattggtaatcatcaattccccaagctccttttgttcccgcaggctccaacgtgtatcgctctatcacctctcgacatacctcaaaatatctaaaccaaatcaacagctgctaactatagtaataatagtattaagagtaaactgtgtaaataatagtaataatgtgtaaatacttgttgagagttagtagtgatagtgctgggaaatgtgattctgtgagtaaatttgataaatataacgctcttaggaaatatacaaactctaactcatttcctaaaatatcattagtaacaagtatcaagatggtggagtgaatagtatggatccctagtgaactccaaagtcaagcgggaactggcccggatagtagtgaggcgggggactgccaaggggagctacttatactaatactatagaaataatactattaaactatatattaatagtgggagtaaataggtggttgtgggtcggcccgggattcgaacccacaacctctaggtcctagaattcgaaatttatctagtcaacatcaataccattggacagataatattactcctttaacttcgttaatagtattaactatgtaatcagtattggtagggtaaaaaagtggttgtgggaaccgggattcgaacccacaacctaacgactgattttttagcattaattcaacaggttattatcaacacaataaatatatcattttatccttaactttgttaatattattaactatataatggaataaataagtggttgtgagcccgagggttcgaacccacaacctaaaggcattataacttcatgttagtttttacggcattaaatccatacacacaaaatattactcctttaacttcgttaatagtattaactacttaattactatgtgtaacactgttagtaatggtaatagtatagttagtgaaaatagtgtgaagagtacctgttccgaaatctaatcttgtggcattaccaaacgagtttaaaaaatgttttttcgctttattatataaattttcatcagttattaccattccaaattcgacaaatatgtcatctatctcctaaacaacatttccacaattaattacatttttaaactatttatgagttaattagtgtgaagagttacagattgtaattggtggattagggttgaaaaggctttattgccgaatcggcagttggtaaagtttttaggatcgtgaaactggaaatatttctcaactttttccaaaattaaataaatcctcaaaactatattcaaattctttatctcagacgagttaatatttgccagaagttggtggaagtcagtcacttttttatctctcaccgactcattcaaactctttataaactcaactatctcaccacaatccactctcacattactatccactctcacattactatccacttttacaccatcagatcttatattatctgattttacacagtcattcttgaaatgttcaaatttttccattaaaaataatttataaattagtgaaattgtgtggaatagtaaaatttattttttaccacatctcatccacaccatagccttccacatgttagaaattattattattatatttaagggtaaataattgccaactgtggaatcttagtgttagcggggtttaaagtgtattttgggggtttagggttgggggcgtgtagctcagcggtagagcagttgactgcagatcaacgggtccatggttcaaatccgtgcgcgccctttttaccaaatcataattattttacttattccccaacaaatattattaaattattaataattaggggaaatttgaataattagggggaaattatttaatttttggaaattaagaatttatgaaattaccggaaaatcaccctaaactgcgcgaaacaaggtgtaaaattacaaatttcgcttattaaaagtgataatgtgtaaaaattaaaagtacattaaacggtgttaacaactggtaacgctatgtactgcccaaacaatttctacagacacattttactccttaaatatgctaaatttagctccaactaagggttattttagctatcttaaagcttaatttagctctatttaggcttaatttagctatttttagtcattttttagctctaactaggagtaattttaggtatttttaagcttattttaggtataattaagggtaatttcacctatttctaaggccaatttaccccttaactaagcctaattttacctattttaagcctaatttaccccttaactaagcctaattttacctattttaagcctaatttaccccttaactaagcctaatattacctctaacaaaggctaaaatagctatagtaaatatgtaaataagtggtgatactttgtttctgcgatgtctggagtagaatctgtagagtctgaagaactgcgtggcgagtctgacgacgcatacgacgatttcaaagtagtctgaggactttgacctcgagacgtcgagtttgattaagttaaccaagtccccgtcagaaataataaaaatcacacagaccgtcaccatcacagtgtccaacagcccctcaaacgatttataatacttattaccctaacattctatcagattatctctattaaattatcatagcgtcgaattccccggagtcggggtattattaaatatataatcgggggtatataatttactacaccgtagggaataattaaagattccaattgttaaataataaattaaattatagttaagtaaccctggaataaccaaactaagtaaaactaagagtaaactaagtaaaattacgagtaaataaaaggtaattaagaccaaaatagagctaaattaaaggtaattaagaccaaaataaagagtaaaactgagtaaaatagagtaaaattacgagtaaaactgagtaaaatagagtaaaattagtttatgcaagcgccgtaacggaaaacttacgtgtaaaacataattaatataaacttcaagtgagaatagaattgtaacaaagagttccaggatggagcagagtaaaattgtcccttcggcgaagatgttttcgagtaaaataataacatttgacacaaacaagaacaaatacgtctttggcgataaatccgaatgaaacaacctcatacaaaactcattcaacttactcatctccaattcctcctccattctctccattccaaacccattctccacattgtttacaatgtttacattctctacagagtttacagagtttacgtagtttaaagggtttaaattgtttacggagtttacagggtttaatgggttaaatttgggttttgttggtagtaggaggtcccgttcgtttggaaccttcattttatttatactaaccgcccaaatccactacaacatttttttcaccttttttacacattttttacacatttcagtagaaatttttatttcattttttaaagtttattttttttataattttcgggtaacttaatttttaaggttatttttcccgaatttcgacctacacatcccatctccctctcctaccccctttcaccttaatttacctcttttaccccttaatttacctcttttaccccttaatttaccttttttacctctaattattacttaaaataacttaaaattatatataaaaaaatgaaataaaattacttaaaattacataaaattatgtgaaaaatgaaaaaaatgaaaaaagtgagataaaattatatgtgaaactaggtaaagattaaataagtgtcttcatgcagagtgggcacacgacgcttctggaaagccagagatcgatgcatttggtgtggaatccgtgtgagcagtggaggactctgagcatatcttccgctgcgaaatcgtctaggcagatgccgcagcacgttgacttgaggtgtagtgcgtttttgtaactgattttgggtaaaacgatgctggtgtagcctgtgattttcctggcagtgccatggctgggcgggaaagtgtaataatacaacacgacagtgaaggcaaatctcagtacgttagcggagagaacgtaaaatataaaagcgtacagccagcgcttgttacaaacgtttggcacgcggtgtaaaatcataccagcaccgtaccaaaaataactaaaactcgtcaactttctactatacgaccagccacggccctgagttatcaccgaagtactaaatcattattttatcataatttaatttgttaaaaatgggattttggaaataaatgccaaagttgatcgggttaggagaaataaattttctccgtaaatcaattctgctgcagtaacaacacatttaccaaaaaataattaacaattgtaaaataaaataccaaaaggttgcaaattagtaaatagtggggatgcgtaagtaggtaactagtatagatatgaggaactagtaaccaaggggctaaagagtcccattggggtggctaacactgtaataaataactaaactctgtgagtacaagctccgtaacgtaccaatagataatttcttgattttcttgattggttagctgtgagaagatgcaataaaataaaacccgaaatgaaaactgcattaacaataccatgcgatacacatacaaccacctacatcatacttactatactcctaactatactcctaactatactcttaactatatactcttaactaatataccccgagagggagctactttattatataccccgagagggagctacttaactatactcttaactatataactgaataaatatgtgtatctggttagattggattgtcatacgtattgagaattttgaagcaattttggcacgagaactgatcgaatttggcgatgatgaggtcgggtaggagtagcatgacagagatgaagatggagaagagtatagagaacctgatgaagatgagtgatctcctgggggagagaagcacaagctccatcagcgggtctgacggcgcctgtcgcgccgtcacgtccgcagctctaaacttcttcaaacatataaaatactccaccacgccaccaaacacacggttcctcacctccaaactcgaacccaaacttccctcatccacaccttccattcacagaattttcaaattttcaaattttctgaaattcctcaaaatttctaaaattcctcaaattgttcaaattgttcaaattttacaaaaatttaaattcctcaaattcctcaaaatatcttctaaaaatcttaaaattaccaaactcgcggggaccaaagggtaaaaattgagaatctcgggaaagatctgaaaatgctaaaaaagttaaaaagtcgtgatgtcagaaattggaaaaaaatcccaaagttgaaagcaacgtcaaattcttaaaatcaaataatctgttaaaatttaataacttattaaaatgagataatctgttaaaatgagataatttattaaaatcaaataatttattgaaatgtgaaaaaagtgtgagagagtttgggagcgacgctgtgatgagatttaaactgctactgtacaaattaaaatgaaaagtcggagataccaagtgcaccatctagtgacttaatgctaaaaaaggttaaaaattagccaatcttaaaaattaaactcagatccaaatttataaaaaattttaaaatattttcactcattttaaagaaaatttatccttctaaaatttacgaatccacgtaaccaaaacaacatcgggtcactcccttaccgtttcaccatctttacacaatttacacagtttttacaatttctcacagatttacgcaatttctcacatatttacacagtttttacaattattgataaaatttcaaatttttacgcaatttcgtaaaatctcaaaaatctcaaaaatctcgaaaattctcctatttttacacaaattctaaaattacctatttctacacaaactctcaaaattacctatttttacacaaattctaaaattacctatttttacacaaattctaaaattacctatttttacacaaattctcaaaattacctatttttccacaaatcctcaaattacctatttttccacaaatcctcaaattacctattgtataataaattaaaagagattgatagatggagagtaacttttttggctcgtactgtcgccttagcaggtttgtgtactgtttgaataggaatttattatcccttgagaattccctttcaaacgtctccctgtcacacacacttctactggcaatagatttgataaagttgtacagcgcactgttcagtttcaagggtttgtagaaatcctcactggcacaggtcaggagaggtgtgaattctgccaactttgcgtacaccaggccgaagcaaaatgcttcggcaaatgctctaaacaccagcgggtgtgaatttaattgtattttacttattgtgagtgggtagtctagtggtttataatactgcttagcataggcaaatactttaccatcagcgtacacaggtttcggactcttttctacctccttagatactattaaacttgaactcaacatagccaaatgcgccgcattcacctccacaacattatacatacgaattttatcatcttttatagtgtccccagtgttagttcgagcagtgttagcagtcacagtgttactcacagcagtgttaccagtcccagtgttagtcacagcggtgttaccagtcccagtgttagtcacagcagtgttaacagtcacagagtgtgtaggttgtgacattagatagttgtaggcgacaatttcgtaattgtgtttggagttttttaggtaaacagtttcattcggcatttgggcgcatttgtagcctttactcttggagtcaggggttaggtatctgacaccgacggctattttgtccaccaagcactcgatgacacattccactagtattttcatctccaaattctttaatttttggagtttggagttgagaacattgagctgtgagatgtgtttgagcgagttaaactgtgctgagatgatttcgaagagctgatttgcctgcagaaatacctcagaaattaacttttgattcagtgaatttaacttttgattcggtgaattgcgactggaaaacgcatttttctcctccgacacgctgtaatcacacaaaacacacattaacatctccacgtcatttgcatatttaccactgctaatatcaccagaatcatgtgtgaaaagagtgttattgtgtgatagtgctgatatgacgatgaatgacacggaaaggaagttgggcctgatactttcttttatgtgatttaatttggataagacgcagtaaatcatcttggcgtatctcggatccaacggtattaaactcacacatttccccagtctcgtaatggtcagctcgtcaaccctgtcaatactaggagtacaatgttgttcaggaggtactttaaagggatcacctaaaaggttcaaattctcctctgtcccccctattacactgttaaagtgtaaaacttacctctaatagttaatttaataatgtccaagtggtatagtgtgagaattgccgagtctatgagttcctttggcggtctcgtgaggaacgtaaagttgtacggattaatcccaaacgagattaacacaagacaaaccgatgttaaattagattccaaaatctctacgggcgacgacgggggaaataaattattgaagatggagtttgtgtataatctgtagcagtggccgtgaccaagtctgccacatctgccagctctctggtccgcagacgcttttgacacgtttaatatttcaaacttctcaaaccccctcacattgtcatatttctttctcttctccttcccactgtccaccacatacctaatttcacagtattttaacactatttagtagttatttaggcttattttagtagtattttatagctattttagatgcattttaggagtatttaggggtaatttaggcctattttataggtattttagagccgtttggaaggcttaaattggaaaatttcggccttgggtagggtcaactaaggtatgttacctgatgtttggcagtgtgattgaagtttctgcgacattagttgacagaataacaattctttcattctccttaggtaacataaaacactccatctacagacacacaatatttattcagttaattatgtaaatagtgtaaaagatacttgttgttggttagattgtgaagcgtgtaggattttgattgttagtttcccctgagaatctgaccctagccactcacaatcaactgatttcttataattttccgtcaaaacattcaattcatattctattctctcgtcagtgtcactatgttgttcatcagaccccagtgttttatcatctaattctcctaaatcaacttctaaatcttcagattcatcttctagttcaaatatttctccatccacagggtcaccagtagtattactgttctcagtagtattgtgagcagtctcctgagggggtatgtacccagtgttaacccccgacagtaacgatttgagtgtgtataattcatgtttccctgttaggaaaactaaaattgagccttgtggtagttttttatgtatttgaagtatttttttcttggcctccaacagatagtcgacgggcgtagttttgttatagtgcacagtgtagtttaacttcccggatgtaatatgaacatgcttaattcccctaaatatttcattctccagaaaatcctccttccgtatcgtagcactcattatcaccaatctacaaatcaagtttatgtgtaaaaattgggtaaaaagtgtaaaattgtgtaaaatagtgtaaaatagtgtaaatagtgtaagatagtgtaaaatagtgtaaataatgtgaaaagtgtgaaaatgagtagttggtaaaaaatacttgagcggaagtttgttgtgttgattgtagagttgacgtctgagtttaacgatttgcgataggagtccaattaatatatcagaatttactcttctctcatgcgcctcatcaattattatcacactaaaccctctacacatttttacacatgtatttagactaagtgtataagtagtgattacgtcaagaggatatcactttttaagtgattgagtagaattccatcggtcatgagtttaattttacagttccgattaaacattttatcatatcttatctgaaccattttgcattatatgttgcttacttggtatccaactaaggttgacgagtttaactctagtgaaatttgcttagctattgctatgcaagctactcttctagtctgcgttactccaattatactttcaccgccacaaaaaccattctcatacaaaaattgcggtatctaatgcatcacactattaaccatataattaactatattaactatattaaccatataattaactatataattaactatattaaccatataattaactatataattaactatataattaactatattaaccatataattaactatataattgagtaatttgtacttgagtggatttccctgttccggtatcacctgtgatgagaacaatatcattattcctaatagcgtcgataatctcctgttccatcatgcaacagggtaatttacgcctccttaaatctacttcaccatccctctccaccaaaacactcttgtactcgggttgtttatattctacagtgtgtaaattaacatttacggtgtcagaagttgtaggagctgatttggctgggggttcggagaaattgtaattttcaggtaacacattggagttaactgatggttcaggctccaataagtcttcagtggttaactcatcaagtgattcctcccgttgtatttcgtcatctactgaggaattatctactgcctcctcctcttgcggttctgtgtttaaatttttgggtttttttttgttatttttctgttggagtgatttaattaaagccttagagtctgaaaaatgtttgaaatagtttttgggaaccttcggaaattgcgaattttttaacctttgtcaagtaatactttatttcctcctccttaaacacgttttcctaatataacaccgtttatatcattttttaccttgaatttcttcctctttttaccaaaggacctttttttactcatctctccaccaactcaccaaacacatggaatcctccaaaataacattaaaataggattaaaataacatcaaaataacattaaaataacattaaaatgggattgaaataaattaaaataaattgagtaatgtgtagattaataattgtcagacgttaatgtgatattttacagaattgaaatgattccagctgtgtggaaattacaggaaaagtatcagcagcagcacaatggacaggaatataatgacgaatgtgagttgttttttgctacccctgaggatgatattattgaatcgttccctgttcctgttaacgaatgagtttgtgtagtccatggactcggaaacatcgccaagcagtctcgtgtgtaaattaacttcatctctgatatttgtacttatgttcttaattgaacttgcactgctgtccagcaaatccaactcgtcgtcctgtatttttatcatcgtgtccctgtaatacttaaactccgaagtcgacatctccctcaaatcagactcgttcaaccgctaaaaacacattagttgtgtaaaattgagtatataatttggtataatttggtataatttggtataatttggtataatttggtataatttggtataatttggtataatttggtataatttggtataatttggtataatttggtataatttggtataatttggtatataattatgtatataactgggtaaataactgagtaaaaaatggtatagagggttacggtggagtttggttgtatgtgagtgagatcggggttagaatttttgagaataagttcgagtgatctgaacgagtaaataacttcatcgagatcccttcgtcggttatgtatgacttgtgagctcaggttactggaatccatgtccaggaggctcatttcgaggttatttatagtctgaaaaattgtgaaaatcatgcggtaacagtgatttacccgttttagagaggcgactttggctcttattatggttaagcatttgagcgtctcggctttatcagtttgcgatgtgtagatattagcgcattcatttgcggatcttattaacgccttagcgttctgtaaatctgtatcccaaaggtcaaccatctcattccactctttacaatcttaaaaattagaaaaatacattatttaaatttaaaatactttatttcaaacattaaattcttattcatatcgggctacaattatttccttccttattcctccaaacaattttaaacccatactacaattaaatactttaaattataattaaatattttaaattatattttaaattatactttaaattatattttaaattatactacaattgaataatttgttatattacaattgaataatttgttatattacaattgaataatttgttatgttataattgaaaattttgagttaaatgttgacggatgggatataagtctagaggttctcataaaaaatttacgcctaggggaaggtcgagatatgtcgcctcggatgatgaaataattgcgagaaatcaagagatttcacaggaaaaacacaaagaatcggaatcagatgaaagttctgatgattccaatgaattagaagaggttccaacagtaattattaaaccctttttagacccctgtaaatattattaaaggctccaacgaggaggtaacggtgagaataatattgcggtataggaatttgagccttttgaggtaaataacccgaacaaaatgaagaacgcagtggaaaaaaccggcgtcgtagaactgagcagaagggaacgagaagaactcaaacgacaaaaatttgaacgagataaaatggtaacaaattattcatttattattcatttattatctattaattaattaatttatttgttaattaattaatttgttgattaattatttattagaggttaatggctgaggggaagttggcgacggcaagggctgacttggagaggtaattgaatttatttcctattataccacaggttggccaaaataaggcgggagagggaggaagctttatcccggaaaatggaaaaaatgaaagtcggaaagagctaaccattttgaaccgaatttttaattaagcagaattttccataactaaagggattttattgtaattttatgaatattttaattttatgaatattttaattttatgaatattttaatttatttcaagtttaatttacatttgatggggagttccaggattccataagttcttcctctatttcccttaggttgtgcagaatttaaactttataacattaaattacattaatttttgtaattgttattattttatgattaaaatgtgtaggcaactgcatatccaaatttgattaatttgattaattgagctttagtctgactaaattttcttaaattattcattaaaaaaaagttactaattttagaaaaatttaggacatttttttgatgttatttggtgttttttatttttcttccttttgcacttgattgcatattattctagacagttttcttcattttccctttgtttatggtatatatttcaaaaatggcttactttaacgccatttactctctagacagatttatgctagttaatttcctactaatacagtactacagcgtattctaaatgtcagttaaacattctattcttattctactggtcctgagcctactaaggcctggaacttccgttactaggaaaagaacacgtagaagagctctaattccagaccaaaatccagaattgtctacagatgacgaatctgaagtttcagaagttgaacgacgcgttcctcccagacgtgcaaaatccatttctctcaaactttccagccctgaaaatttaaaatccaacgagtttgaagtttcaaatagtgaaccacctgagaatttacataccgaatcattagagaatttacataccaaaccctttgataatttacagagtaaagagtttgacgatttattgaataaaaagttagagggcttaaagtatgaagaatcggaggcttcagtgattaaggaaccagaaccttcaacgagtagggaaccagaaccttcagtaattaaggagtcagaaagtgtggagattgaggaaccaaaaccttcagtaagaagggaggcggagcctctaaagtatagtcagacttcggtgaagtttgaccgtgtgactgagatgatgtcagagcatttatcaaagagtggcgtggattcaaagaagttttgcaaatatgattggcacaactgcacgaaatttatcgaagcttacaccagaagatgtttagcgggagactgttacactctggacaatgttccagtggtagatttgcaggacggtttaaaggttcatcttccgtttttgaaccagtatgcctttgctatggctcttttcgaggattcaggagcctggcaaaagagtaaattctataacattttcggtaaaattaagaacaaaatatacggcagtgatgagcggacaattgagtcctttaataataaaataacgcggattagctttaggaacatggactttggtggagactttaatcgcatgattctaactgaggttttgtacaaggcttcgcttcactatttggcatatttgtctgagagctccctggccaaatatatgaataaatggaaatttatgcgcttcttctttaggctaaagcagaccagttggcttactggggcagcaaaaaacatagcaaaatcaaaaactcttgaaatgggaatgcgtgacctacaactggtaatcgattcttacctgttatatctcaatgtttctggtgtggtagagcctgaacggttgaccatttcatactctaaactggtgaaacactcaataatgaaagttctgggcactaaagttgttagcgctttaatgtcagattatatactaacaatgcctccaatgcttaacgatttctgtaaaacctcagatgataaaaatgagaagcaaaatactgttccatttactccagttcactgcaggaaaatggtatcagactacttggaaaggtgtcaggacggtgactgtattactctggatacccgaacgttactggatggaaaggattacttgaatgtaaatcttccagatttggaccagttgaatgcggctgtgacaatctttgtaaattccagagcgcacaaaaaagcaattctcgacttcattttcaggcgtaaaaatagaataaaccaaagccaatttgtgaataaactatacactgagaatctaaaggaaactaaatttaataacagagaccatgaagtgctgggcagatatctctactatgacacactttactttaaaatccgaagcctaaagaacagaattaggttatttttcagtaagaaaattgaaactgagcttaaaaatttccttcaacccttggttaaaattacgcctgtgaggattaacaaggttaaaataagcttaatattcgtggcatacagaaactacttgttcgaaaataacttcgcaaaggacagagacaagcttatcaactttgtacaaatctgtcacgaggttttgtcgtcatttactgacctcatgaacctggtaggaggtaagaaaaaggagaaagcaaagcatttggagcctgaggaggaagagttagaaaagtcaaattttgactatgaactggagaataaactaatccatgataaagaggaacccttagtttcaactaaatcgcataaaaaacatgtaaacttagagaatactgttgaaaatatggaagaagtatattgatagaagttgaatgtttggaagtatagaattgagaatccagttttaaatgctctaaatttgagataaatgtgtaaattattctattttgaataattattctcaattcctggaatctggcgacacacacaaacttgattattatgttcaatataattttccaaactattcattattaatttatacaattttaacttaattaatatttaattaatgcttaatttatgtttgtttgtatcaagtgttttttggggccctattattgtgattcctcaaaatctcaatttagcccattttacgccaaattaagccaatttaccagctgattccttaataatataaattatgaacttgtatactaatgtaaaaatgtaaatgtgtagacacttggttacgaatcctgggcttgaattcagtttcaattgtttccaccaacacatttttaaaattatcttttttctggaataaaaatttttaatttttataaaaattatcccagagtgaggagttattaggtgattgttgaaagcactctatatcttccattgcactgggatgcatgattgatttagacaaactcctctcaaatataatcttcactcattgtttattatatttttttcttatttgtaaagtagtttattatttttttccaaactattaattgcacaaatattaaatccaagtcacacattttatccacattgtctatcctatcttactatcgaatctaaataaattgcatctagataaaaaaagttaaaatgggagttaaatcactatttaagtgctttgcactaatttacttgttatttaattatgctagtggtgtaactcttaagaagaacaatggcggctccactttggaaagtcagaatactgaggagtttgtggaggagactgagaaaactgtgaaggaggttaaccacttgagggtaatatctgacaaaatgaccagctggttttccaagaacagttttaacccttcaatgttctgtgaaggcgatttaagcacttgtcacactttggttaacagatttgtgactcgctgcaaagccggcgactgcttcactgttgacaatgtcaaggtcttcgcctcaggtgacaccactggtcttttccttcctcacttggctcagtatgagactgcaaagtacgtcttcaaaaactctggagctaagcagaacggctggagtgactttgctgaccgctttaggacgaataagggcaaatattccctccaagaatttactaaccagattctaaagcggaatcttgacgccatgaatgttgaaaatccaaccatggcagtactaaatgaggtcttctatgcccttacaatttactatcagaagtatctcaacaacaataagctccacagcagtaaccaaaacaataccagattcctgagattcttcttcacagttggtaaaagaagacaacttaacagattagtcgcggatgttgttggtgaaaaaaaaatggacatatcacattctgacgtaaagagcatggttgactcgttcgtattgtacttgacaattggtaactataggcctagacatagacttgctaatgcctttggaaaactcgcaaaacacgctcttgccaagactatgggatacagaaaagttagcttcctcatggctgatcaactcttgaactacccgctcgatcccatgcagttctgcaaaggcaaagccgacgttggttgcaaagaaactgttacaaaatacttcgaaagatgtgatcacggcgattgtacctctcttgatgttgttaacctcttggatcaaaaggattggctcaatgttaaactacctcagctgcctcaagcctttgccgccttccaactcttttccactagcaaggccaaacgtcctaactggctcaaagcagtatttacgggacagcacagaagaatgggcaacgaagagtttaaggatatgttatacgaacgcaactttgccaatttgacctacagtactaagaatcagggcttacttgagagattcctgtctaaagccgcaattgagtttatgtacagggccagaggtactgaaacgggcaaaagactaacaaactcaagctcattccttatggaggcaatgaccggcgtcattggtaagggtagagtgttcgtcgaagtgccaagagccaaggccatgatgctggcctacagaaattacctctacaagtctggtcatgacgtttctctcagaaaggttaacaggttcgcctctgaggttcaacacgtagtcttctccttcctgaatgacccgtacaagggtgtgtactccaaggaatacgagaaggagtgggagaagaaggtagaaaaagaggccaaaaagaagcaaaaggagcttgacaaactcaaggaacaggaagaagaaagcgaggaggaagaagaaacaaacaaggtcaaagacttctttggtagattatttggtggcaaaaagaagaaaaagacaaagaatgttgatactgacgtagaagaagttaaggataaagtacaaaaagaagaagaggcatatgccaaagcgagagaagaaagacttgaagaagctggactctcagttgaataaactctcccaacccattacccatcatcactaataaccattattaataaccagtgttactagtattaccattgactagtataattattggaaaggtcaaaacaggttaaactatctttatcctgttataaacaaaacattgcagtaacaacttaacacacttcactgtaccaaagtatagtatagtaggggttggatgggatattaattgtcaatttccaaaggtttccttttggaatttcgagtttaaaatatcctaaattcgagtaatgttttggttatcaaatcgtatttgcggaccaattcgggaagcattaaaaaataataaaaaacttaatttcttatcccatatagactgtaactattcacagaaatttagattttacttttataatttaatagtaaatatcatcaattgagaaaattcatcagtatagagtaatagtataggaatgtgtggttgaatttgttttttagttgttttattgacatcaattttactttgtaatgtttagcttaaagttcatctaaattataaatttataaataaccttccaagtcttgcagatctgggtgaatcgcaatgattagtcgacatcgtgaatgcacccatatagatctaaatactagacaaaaaacgcgcccctgttctctgaacagattaatatcacaaccttttaattttttaataaaattttgataagatttattatttttcaaatgtgtaaatattttcggctaattctgaaaaatctcccaactcgccattattatgctcaatctcctcttaatactcctcaacatacttgtgatcctagaagttaataaatgtttttgtaacgatgattcgaaagtagaacccagggaagaatttggtaccgtggaagagcgtaaacgaaaggctaaaaaagactttgaaaatctcaaatctcaatgtcatgattcagaagacaatctaattccctgtttaatgaaagcatatcttacggcgtacaagttaatacctgcgaaattttgtgaacctgatgaccaaaattgcttgaatatggtaaaattatttgatgaccgatgttcccaaaaagctgaggaatgtctaattttagattcagttgatctggtagagttgagtgacggtcacgtttatgttcctgatctcgtccaagttgaaatttcaaactttgttttcaggaagtctggcgcatataaatcctgtgaatggcctagttatacttgtgttggagagtgtaattgtcactgtgattctaagtcagtggaactggtttataagagggattttaaagcctttgttaagttactaactgaaaaaaatgctgaacgtcttggtttaaatgacgattcagaccttgaaacacttaatatttttctatacaggctcctcttatattatacttagagatatctctataaagaagatggcagtaatttctgtactaacaagaacttacagcctactttgagatactccaggtcaaagaaacatgtgaaagtgttctcaaaaatgagacgaaatgaggatataaagatccacgtttcttataaagaccttgagaaattatttaaccagttggtaccttttttatctcaaaatcctattagaaaacatgaaaatatggctttatcatttggtaaaatcattagatatacgattgtaaagtcagtcccatactacaaacacagttatctattcgtggatgttttgaaccatgttttggataaaaaattcggcccctcatgttgttcaaaagatttttatgaaactttttgtgacaaatattctccaaatggccgggagctttttcaaggatttgtcaaaagatgtttagatggcaattgttatgtttttgatgattatacacttttcaaacctgaaaccgaccaggatgagaacgctgtccaagaaactaatgtggatgcggctactgcggaaccagctggttccggccatgaggttgggattaaggctggacctgaacaagttatatcgaattatatacttccaaacttgagtgaggtaaatttggtgttctatctactgaaacatacaaattttaagtacggtaaattttcatcatttttcacaaacagaacaagaccaagggctgaaattaagtacatgacaccaagactaatgtatgttaataagattaagtttcaagttccaaatgaaactcatgaaataatacagaaattcttatactatagcgctatttacttcgtgaaaacgtacagggaaacctggattactagaggcgccaggcactttgctaactgggacgtaaagccaaaactaagagagtaccttttaggcattggaaacggtagacctttggttattgaacaagaagaaattgaaaagattatccccaagtttaaggaatatcttttaaattcttactatagaaatcatcccagaagggttgataattacgttggtaaaatggatgaagttttaacggcatattataacgacagttcgggggatatatgttgttgtagtaaaccttgtattgaatgccagtaactttatttttatgatagaatctcaatttttttgttaatttataattattttttcatgtataatttgtaactgaatgtatgattatttattaaatttctgtttaaaaataaaaaataaaatttaaataatttaattttatataaatttacaaaatgtgtaagtagcaaatttagaattccgggtaacacagtcataagttcgaaaatggactttaaagccgaaaatcgactattccaaccataacatatatttttttaattattctaattttttataaatgaaataaacggaattatgtgttaaatgagctgactgagaaatagtcttccatcgcactaatgtgcataaatgaaattggcaaaaactgtctaaacaggattttatctcgaaaatgacaaatttaattatttaaacatgttttattctaattatgtgactgagttgtaaaaattccacttttaaggcgtgattcattttcaaagggtcggattgaaaattagtaaaaatgtcaatacggagtgtttttataattttgttactgagtaaatctctggtaagagagtctaatgcagtgctaaaccacaaaaggcccagtgagctgggcgttaaaaatgactttttcgagtcagccgatggcgactatatagacaagttcgtcaataaaaattccaacgataatactgaaagcgcagttgggagtcttgaaaaggcgttttcgaagggtacaaaaacaattaatgaaaccgcctcatcagtttttgaggcgttttccaatgggcttggattactgataaacggaagtgagatggtgggagaaaagggagacgccctaataacgaaaggtattagttcaacgggtcgtttagttgacaggacgaagcaagtgacgaggggtgtgacagagctattggaggacacaagtcccgagtttgactctcgtgtgagttcaaaagaaaatttggacaagtttaaccattacatgagcgattatttgaagaaaaatgagaataaagtagaggaaaggattgggagggaaaatctgatgagggataaatattacaacttatacacccaaagatgccttaaaggtgattgtctcacccttgataatcttaaagttgccgatctgggcaataaaataaagctttatttaccaagtttgaagcaggttgaccttgcgttacacctgtttaaggaatctgtaaacaatgaattcagcttcgttactacactgttgagaaggacaaactacaactcaactgagtttttcatactagtacttgctagacataatttaaagaagcgagaattcctcaacactaacgatgaaggtgttaataccttctactacaaagccacactactgtataaaaagttcacagctgagtcaagaataaagaaccaacttgactccaaaaagactctgactactgttttgggcttctttgtcaagtctgacctggtaaaagtggcccaaatgtcatcatttgcaggtgacataaaacttgaccctgatgaactaaatcaattaactaacaactttaaagagtatctaattaatgattctgaggagtttaaatatttatcagactcctatgcaaatctttgtaaagaatgtttacaaggcacttatgaggaaaacatgttcaacactgagatgatggattatcttgttgagggtaaatacgatgctaacggcatttgtaatgaacaaggtgaagagtgtttggccatgttggatcgttatgtcgagcgttgtaagactggcgactgttacactctagacccagttaacttgctggaaaatgttaggctcagagtattaatgcctaatattccacaggcgaaactcgcacttagaatcttcaaactaagtaaggcccacagaggtggcaactttttcacgagattcatcaaaaatgtgctccgaatacagacacaaaagactctacgctcattcattattatgttagcgagacacaatgtgaaaatgtcttactataacaatgaagctgaaaaggttattaaccgtttcctataccagtcaactttgttttttgtaaggtttttaactgtttctaaattaatcacattttactccttgggtaagtttaccctatggctattctcatttgggagatataaatatctcaaggagctggccaaggacataacatttggaaataaaattgtcttaacccatgatttatcaaatgtaatggtcaaatacagcgattacctcgtcaagtttaacgagagtaaattacataaaatagctaaatactttgcttccatgtgtagggaggtggtaatgaagcatgtgaatgtggacaaaataagtgcagacatgttcgacactatggaggagattaagcctgaggaaatttgcggtaaaaatgaaaagctcgattgtcctcctctagttaaattattcctcgaccgttgtaaaaacggcgattgctatactcttgacaccaaggatttctttactctaaatcgcatgactaaattaacacttccagtactgcaccaagttgacgccgctattcatattttcaacaacagtagttccaataagggcagatttctcagattagccaagtccctaagcactggcggagatgtggacccttttatacagttttacaggaatttagtaaaccataacgcgaaactaattacatataaatcatttgataacgaggtgcttaacagatatcttttcaactctgcagtttattacaagttcatcagtgataagcatttgctggactctgtagactctgaatttctccgagagtttaatcacacttcggagaaagttgaggggtttatgaacaggactttgagggctctagttggtgcagaaagggtcagattctcagacattgagctcgacgaggttttcagaatctatcataaatacttttacaatactcaagttgtcaagaaccaaaacgggctcgaactctttatccaatcctgtcagaaagttatcagactgttcaaaagtatgcaaaatgatgataaaaaatttaatcaatacattaaatcccttgaagaataattctattctgggctaatttttgtaagattattactgtaaattatcgtaaaaggctttggaaaattccattcctattattttaatctattcttttcacctttacacaatgggatttatttgttcatttatgtgttaattatatatataattagatgatttatgtattaactagtttaattattagtttattaatttgttaagttttatgaattaatttaatggttgagatgtgaataggttaggggggtatggatgccaaatttaagtacacctattcttattattttaattcacaatttataaaaaattacttgtaaaatattttaatataattttaatgcttaaaaagagagaatgagcttacaatcgttgatagatgagtttactaagttggacgagttttcaaccccttcaaagcaccttataaagtcaattttacttagccctgaggttccactttcccttcagcttagagcgctttactactgcagggatcttcctgaggaagattgctcccaaattctcatttcagctctcgatgttcattttgacactttcatgaggtaatttcacccttaaccatgttcattatcatgtttcagacatgagatcgcatatgtcattggtcaatctggctgttttagcgcctctaaaaagctcgctgagcttgtagagaatgttactgaggatcccatggtcaggcacgaagtttgtttattttcttaatttcattttttaggcaattgaagccttagcagctctaaaatccaaagattatattcatctcgtttgattccaactatttatacaattcacctaattttacacaatatttaattttacttaatttgataaattagataaagaagtattgtgaggacgagaacagagcggttagagatacttgtaatttggcattacatacacttacaaatgctgaggagtcaaacactgagggttgtacttcatttcccatttcttcttccccttacagggcaattgaccctgtcagaacagactcagttgatgagtctgatctcaattcactgtccaaacttttattcgatcaatcattaccattatataagaggtaattattattatcatatatgagtgcagatatgaggctttgtataagattagaggacattcaggcgatgaagctgccaaggtaacctaatactcattaatgtattatagataattggagaagctctggttagggataaggtttcggaggtgtttaggcatgagtgtgcctttgtgttgggacaaatgcagtccgtggctccagttaagtcactaattgagtgtttaaagaacagagatgaggagcccatggcaaggcatgaggcagctctggctctgggttcatgcgcttcactgtgcggtcaagaacaagctaagggttctgaagattgggaaaagttaattgttgaggttttggaggagtttatgcaagatgaagttaaggtcgtttctgatagctgtttagttgccatggattatataaatgaaagtaaacatgaattaactgcacactaatttacaaactgtaacatatcaattttccgagaataaaaatttaaatttaaattaatttcattcatttcatattctacaaatttaaaatcagtttagtacaaaatactcagtggtaagattccagttgttgataagtttctgaatcatgtgtaaaatttaattttaataaaagaatcttaaagttgcgatttagagttaatttgacaaatgagttacatcttcgtaggcacaaattaaaatgatgaagatgagtcaaaaatgtctagggtgggttggaaccccaggataaggatataaaaggctttgaaaacagtttcattattatttatattactatttcgtcttgtatcatttcaatttggcggattcctcatcgaaagatttttttcgcatttttaaaacgctgattttgccctagatttatctcgcttttccgcaaagtttcttctgggattttttgcctctttgctcttatgatcttttgaacttacgctcaaacaaactctattttaagaatctgattttgctctttaacgatgttctttggaggtttcccgtttgacggaatgccgggaggcagtatgcctcatagcaggtcaaaagaggttagttctccttctataactttttttagcctgtcgacactgagaaactttacaaacttctcgatttgtccaaggattgctccgaaagtgaaatcaaaaaggcatacaggaaacttgccattaaacatcacccagataaaggtggagatcctgaaaaattcaaagaaatctccaaagcgtatcattatttttatcttcccaattatctaattactcaaatcatttaaaatttttatcaaaattactatgtaattacaaaattttacataaatatattataaattattaaaatttttattaaaattactatgtaattacaaaattttacataaatatattataaattattaaaatttttattaaaattactatgtaattacaaaattttacataaatatattataaattattaaaatttttattaaaattactatgtaattacaaaattttacataaatatattgatatgaataatgatgttgttttagatatgagatattgtctgatccagacaagcgtcgcatatacgacgaacacggcgaggaaggccttgacggaagctacactgccaccgacgcttctgacgtattctactcataaactacttatacaacactatttactatataaatattacttctacactgttatctacacaatttcaaatttgctgtagatatttgatttgttttttggtggttctcgtaaaccaaagggtaaaaaacgcggtgaagatatcgtttctcacctcaaagtgtcattagaacaggtaatctcattaatgttacaccaatagtattacgccaatagtatatagttattacatagttaatactacaataatagtataatcttgattctagatatataatggtacaatgagaaaattggcgataaacaaggacataatttgcaatgtttgtgacggtcacggaggaccaaaggactcatttctgacttgcagttcctgtaacggacagggaattagggttcagattcgtcagatgggttctatgattcaccaaacccagaccacgtgttccagctgtaacggccaagggaaaacactcccagagtctaaacgttgcaaaaactgtagcggtaaaggtgtaaaacagacgaagaagatcctcgaggttttcgtagaaaaaggtgtccctgaccagcacaagatcacatttcacggcgaggctgatgaaagacccaatgagatcccgggctccgtcatcttcgtcattaatcagaacccccatgacaccttcaaacgtaatggaaacgacctcttcatgaccaaagcaatcccactttaccaagccctcactggatgcaccttctatctcactcatctagatgatcgtatactcaaaatcaacgtaacccctaaaactaccattatattacttatttattattatagtattattatattacttatttattattatagtattattttatttcttatttattattatattattatatagttaatattatatagttagtattaaagtggtgtatattttgtttagactccacctggtgaagtagtgaagcctggatcgtgtaaagtaataactggcgagggtatgccgatatataagagtgcctatgggaaggggaacctttacgttacatttgacgtgatattcccagttgggcgaaccttcacgccaggtgagaaggagaagcttctagagctgttccccttcacgcccgagactccagcaaagcctgacactcaagtcgacgagtacaccgcacagcactttgaccttgacgactacaagtacactgataactcaagagaatatgaagaggacgaagccggacctaccgatcgggttcaatgcagacaacagtaatctcacattttcagcgttaatcgcattagtctcatactaacacactttacacattattcattctattaactatattaattcactagccacgtactaaactataacatatgtgttaggatgagattattttttgtttttattctttttcttgattttggaagctgctgataaaagtgccgcgtcagcaccaggcggtccaaccagcttaggcttattaataacaggcacggcagtctaaacaaatatctcagtctaattgataactaatataattgagtgtaagggtgtgtaaaaaatacgttggctggaatattcgtttgtttaatgatttttggtccagcgagtgcgccaggaggtctgtaaagacgagttgatgtggtagagttttccagagtaactgacggtgaaggatctctttgtcggaatttgaactttgggttcctaatgtacacgtggtaaagctcctcaaagtcaaccctctgaaccagcttcccactgtaggaaaagatcttaaaacagcagtcaactctcatcctaggcactgttgtagcagttacaaagtacattccatcaggactgaactcacaactcaccgaacactcagactacaaacattatagttaaaacactaaattacatataattaactgtatatataattatgtaattaattatatatataaatatagtcatttattactttggattgtgaaatcttttttttggttttcatatcccagatatcaatttcgcctctcaaattgccaaatccacccattagaacaagtctgtcaaaagggtctctcttcaccgtgttcctattattcttgccaaaacttaacgtcttcaaaccagtcacaccatcatacaaatcaatctaaccaataaaatataattgtgtagtgtatataactgagtacaaagtatctaaatgtgtgaaactgtgtaaaaatgtgtatagtatgggtttaacaaacttctgctggcattggtccttttaagagtaaaaaatccttcccattttgggaccacgaaatgtcatgaattataccatcgttcactgtacttatcgtcttaaatttcgagttgttcaactaacacaattttaaacagtataataagtataattaaccataaaataggtataattaactataaaataactgtaaaattatgtaaataatgataaaatagcactcaactatgcatgaaacgatacgttaatgaggtataatgagttagctccatagtaggatgaaagacctttgactgagttagcaaaggttctgaagagtacgctggtgcctttactattccagaagagttccccttcctcactggcgtcgaattctttattaaaaatcggtttctaaaactaatattagtagggtggaaacatacctcaagttggtttgtggagtaaattcttaaaactccacggtcgaatttgccctgatttgacgcaaagatacctatgtagcaaacccccttatcattctacacatgatttaaattacaatttgcttactggaggtgagagtgaaattgtagctccacttggtaaaggattagtcgtaggactttttgcggagtcagttgtatcatttggggttgaatcggggctcaaatttactgtaaaactcgcaaataactttgaaaaatcattatccttccatacttttatttcattcattacctaatcaaatttaaattgcggtaattgtattaatattattagtcataattatgataaattaggttaaacgtacccttaaaatacaaaaagattcgtcttgagtccaagttgggaatctgctaacaatgtaggatttctcatatggtagtgatagaaccacgggataattgggatctaaacaattaattagaacaattcacactaactatacagtgaaataactgaataaaataatacctttaaggttataaaccactaaattgttaggatttgactcggaccatgacgttaaaactgttaaaaatgtatccaaaggactgaaaaccacttcttttaatacagaacctacacaatcacattaataactccattatacagaattaacatatattattaactatataattagaatataattagaatataattagaatataattagaatataattagaatataattagaatataattggtatataagtggtaaaaatagtagttagagtaaccatttggtagattgagagattttagaactttggaagtttcgagttcagtgagttgaatagaattggaagattcttttaatatacagacctgaattaaagatgaattatggatgagttagagataaaattaccagattccctttattgctaacaaatgactttgaaatatcggaagattcccagaacagctccagcttctccactaaaaaaataaatttagactattcattttagattacctgaatttgtggctgtttttgggtagaatttgtatatgtgtagagttttcttactcagggccaccagaaaccaatggtcactgacgaaggaatgatctctcagggtaactccatttaacccgtcagcaagaacttccattcctattttaaaaaatttaaaaaattttatataatctctacatttttccatgccatcaacaccacacaagattccattcaagattcatattaatactattactattactaccaatactattgtaaataatttcttataataatattattaataatatagttaatattttgataaagtttgtttaaatattaaattagttgagattgacgaaaagtattttacagaggttatttttaattatattttcaagcgagttttcatcacccttaaactcttcgaaggtctcaagtgcctccttaatctctggaatttcacagtttaacagctcaagctgatatactttccattccagctccttctcctttaattccttattatttgctattaaactatactttccatctttatatccatacatatttttactcattgcttcatttaactctggtaatatctccgaaatcgtcatgttattccaacaatcaatctgaaaatcatattaatacattcatgaactatactattattaagcatataactacataaataatgagtgaataagaaatacaattccgatgagtttgtattgatcatttctgggcgatgatttggaatttggcgtatgtttaacatttggatctagttcttcaccgtttacatcctgtttataatttagatctagttcatcgaaatcttcgactgagttatcttgatttcctgagctataatactctaaaaagggttctgtttccttagaatccaaatcaacattacactcctcatccacaggatctcttacctcctcttctatgatattacacttcctaactgggcttttcaacctataataatcagccttttccacattcccactgttaacattatcaacactactattaacactattactggagtaattgttaaattggttaaaatgtcttctagaaggagttctatcgtatccactccattcttcatcactagtatagttactcctaaaggtactagtaccactcctgccactattaagtccattccttggagtgtcagttttgggtaatttgaacacgaaaatcttaacatccattaaatcaatgtcatcactgatcactattctatcatctgagtgattttgtgagcttaaattagtttcctgaaagtgaaatttaaacgccaaaaaattattccttggtcctaggcaaatcacatcaccactctcaatatacgaacttcctctcaagaaattattattcaaatataacgcaccactctttgtacatctggctatctttactctaaactcattatccacaaagttatcatcattattaccattttgttgattattaccgttttgttgattattaccattgggttgattattggattgatcagcgtcagagtattctagagcgaatttaacatgttttggagcgatgaatttgaagtgtttttttggtaaaacaaggtcacaagttgtgtctgagccaataataaaggggcttttatttatcactactcttgaagggacataactataatcatccaccaccgataatttaggctcaaaacttaaccttagtcttttatcctcaatataatccacttcatccacattattcagattagtgttagtagcattatccgaattgtattgaattggagcatgtttaatgtttttttggggcttagattttaatttatttccattataagcatcaacttgtggttcgagtattaataaattggacagcggagtattaatggaaaggtcatcagaatttacaaagttcgatttatcacttgaattatcacttacggttaagttgttttcagaatatttagtctttcccatactatggttatcatttgtatcattggtaaagttcattaataaatctaatggactaatatcctcttgagttccacttgctgttctatactcatcttcagatcctattacactctcatattcatcctctactttatcctctggttcatattctaatccattatactgcgatccattatcgtagtgtaggcgtttatcattttgtgagaaggtattattcctttgtaaagcaattgattcaagagattgtgagcggcttctgataactctacgttcattgacgcgttttctggagttcaaatggagacttgaatgactactttcaaggtcgaaatcactggagtctgaactcgaaaagcctacagataagtcccgaatgttcgaaatactcactgactgaagtctcaaactctcaagtgcagagtccttagtgttatctctgtacacattgcgaactctgttcactatggcactacttctaaatgataccattggaacttcacaaaaccattaaaataaacattatcgtaattatatcattataattgtaccgttattataaacattatttacaggcgaattaacaaaattgtaaatattatacttgaacaaactatggaactggtgaaaaagactacacatttactgaattaaacgaaaatttaaaatttaccattaatttatctttattttaagactccattagtgagaaatacagttaattacttcattaactgggaaaattttatgacctactctgtataatattttacgactagaattgaagggatccactggcaaaagaagagaaaactgagaaaaatttcaattttaagtttaaatttttaaaacaaaaaattaaaaaatttccagctaaaaatgtgtaaaaattaaaaaagataataagagttcactttcaaagcccagggaagtacaggtaaagaagcatctgtcaacaacttgaaatgtgactaaaacagttaaaaatatattaattataaaggaatattactttttatttccccacatcatatactaagattcatttttccaaattgcccacaacttgcgtttattttactttatttaagtattttttaatttgtttaattattttaattcaaatgccagtattttaattttaaacatttttgttttgaggctaaatattcaaaattgccattgactgttagtacataaatcattggtgttattccttcgcttttattttaacttattttaacaattttatacattaattttaaagctgtcaatcgcattataaaacttcattttcaacttgatgaaactgtttagtttgatctgatagtttattttaaaatttcctgggtttggacagaaaatgagcaagaacaaggagaatctgaacgagcttgacgcggcatataaggaggagctggattccttggtgttggatttgcttaacaaagatttgtgcagtcctgagtctgaatcgattttacttaaactggttgaccatgcgacaaatgactttggaaatatttctacaattcccaaatctctccagtttttaatttctcacaaagttgccttagacgagtattacaagcgatacaccctcaaaaacggccaggataacttttctctagtccttttactggaacttatcagttttctcgacgctattaatcttaatgatacacccaataacggtaacaccaacggtgaaactgaagctaataaagttcctgaggcgccttcgttcaagctacttttatataaactcgaggctaatttaattgctcaacgtcttgttaattttatttcatccaacacttctactgattctactcaaaatcaagttacaaatcaagcaacaaatcaaccaacaaatcatttgacaaatggtgtgaatgtaaattctgagttggaaggtgacttaagcccgcataaacatggtaaaacagttttaagcgatgtagcaaagaaattattaactgaacggaaggttagtgactggggaaatgaatacttaatatcactttcatctcaaatagtttcatattactcagcaccctcaaccagacaatttctggcaaataaccctgtcaactataccaacctcaacaataatgttgtaaactttgttgacgacaatttactaaataatattgatgttaagactgtgattggggaagtgaatacgggtttagtgatatttgagagtttgaagttgatagaggagatgacagcatattggttagcaaatgggtttgaatttgacgcaatagatcttttacttgaggttgacaggatagagtcactggaggacaagtgttcagatgactatgacttggtgactagagtttcaagttacttggcttcagtttcagcctatggtgctactttaagtgagacttgtagaattctcacggtaacctataacatactgttgagaaattctcgttatttagaggcaacgagagtggcacttaaacttaaccaatatgacaaggttatagaagttttaaataagtgcgaggatattaatatacttaagcaaattgccctatttctgggctcgaatcatctgtttataccaagtttaactgacgcttcctccaacagtggtatgaacctggatatggaccttgattacacagtggtatacttgaatagtggcgagaatagaagtagtttattcctatctctctgtaaggagttggacattctggaccccaaacatccaaatgacgtatttaaagggtatccttcaaagagtaacctgagtttaactcagtcaatttctggtgtctcaatcgattcagcacgtgacaacctttcatacacctttgtaaattctttcattaattgtgccagctccaaagataaacttattacaaccactcaatcaggtaattccacaatagtttattatatagtatagtatatagtataagaatattatggtatatagtataagaatattatggtatatagtataagaatattatggtatatagtataagaatattatggtatatagttaataatagttatactgtagtaatattagtgtaataatacttataataaaaccacactaactattatatttagataaggataaggatagtacgaatacatcgagtggtgagcaggaaaattctaaggataagagtggagaacctgatttttggttatttaagcatcaaggatacggattattatgcgcttcagcaagtttgggtttattacatttgtggaatttggacgagggtttgtctgagattgacaagtaccagtacagcactgaccagtacataaggtctggggcttattttgcatttggacttgttagctgtggagtggcttctgaacttgacccggttcaaggtcttttactggataagcttgactcatcaaactttctagaacgtttgggtgctattctcggtctgacatttgcatattcaggaactaaccgacatgacatgcttgagcttttgacaccgcatgtggttgatttgagttcagttgagtgttctcttttcagcagtttagctctctcagtaattttcgtaggcaccggaaaccaagaatcctcagaagctattttacaggtgttgattgagtacatctcgtcacacgcagattcaaccccaaatttaaaatacgttagagtatatttatgcgcactggggttactccaaatgtgcagaggagaactttgtgaacctgttttagatgccttgagtgttttaggaaagtatgaaaaggttgccgtaaccttagtcgagtcttttgcctacgccacttccggggatgttcttaaaatacaaactctgttaaaaaactgttcacacgttactactactaccactatcaccggtagcaccagtagtactaatgtcactactgatgctaatactaatactaataccaataccaatacgagtggtgatactaatgctaatgcagttaaggatagtgttagtactaacactgataccaatgctaatactgattctaatagtaaaactgataatactaacaccaatactaataccaataccaataccaataccaatacaaatacaaatacaaatacaaatacaaatgctgatgcaagtaacgctgatgcgaatgttaaggaagataacagtgttgacaacgagttgtatggagtaagtatactgtgtatatcactattgagtatgggcgagacaataggctcaagcatgctggtaaggttgttggagcacccattacagtgtggaactgtacatgaacgaagagctgttccactcgctattgcgttagtgaatgtatcaaatccagcaccagccattgtatctgcactttcaaagttatctcatgacagtgataaggacgtctcactgtgtgctattttgggtcttggtttagtaggtgccggaactaacaattcaagaatttctcaattgctacaaaacatcgcaaaacacagttacagagattctacactaatgtatgtcctaaggctcagtgttggacttttattcatgggaaaaggaacactaacactcactccactccactctgactcctttatactcaataaaacgtctctggcaggtttactcataactcttttttgtgccctggatttgagatcactagtatgtgatgagtttccatttttacccttcttcctagcactagctgtgagaccgaagtggctgataacgcttaaccaggacttggaggtcgttcacatccctgttagggttggcactgcagttgacaccattgggacagctggaaaacagcgtaaaatctcaggattccaaactcataagtctccagtcctcattggggttggtgaacgcgcagaacttgccaccgaggaatacgagaccttcactccatttcttgaagatattgtccttacaactcaagttccacatgatcactaattttttaaacaccatactctatatatttatagtatatagtatgttatatatagtataccaacagtatgtgtatattatatattggtactagtgtattgtgtataaatagtatatagtttatattattgcactaaaattagtattaaaattattattgtacagtgatttgaagactagagaagcattgacagtgagtcgttggtgttgatgttgagaagttttgcgattttgatgaggtactggatattgtccttttgattcttgagcctggttaaattttcaaattcctcgtcaatgaacatttccagtgatttttggagaattttaaaggtctcgttatgctcacaaaacttggataacaagttaatgtaatattctccaatgtactcaatgtacacgttaactccactggtttggacaccatcagaagtagcttcatacaaattctttattaaaaatgttacattggtggaaatgtactttgaaattgattgcgatgctgtgaataaaagtgtcttaacttcaaactggtccatcaagtccgagtgtttactggtggaaaaaaccagttgtctgaagggttgtaaaagctggggtgccagtttccagtcatgattctccctcaaactgttgtaaacattcaagtcaattttactatccaacgacaccgtcgcagaaagtaaaagttggtgaacgttttcagcaagtgacctatgagtttctaatagtgctagtacaaagtcccgcaagctgtgttcaaactttgtgtttatgggatttgtctcaaattttggaaccagtgagctgaaatattctttaatgtacttacaacaactctcgacatacttgtcatattcaaccttcaaattatttaatttacaatatacggttagccacaggagtacttcaggcttttgatcaacacagttaacattgtagggagtgggtactagaagcttaaaattgtaaacacaatcctccaaactattatatttctacaataatatgagttaaactattattaccattagctctgtattagtaacctgttgattgtatacataacaggtgtaattgtccaaaatgtcaaacgggattaaatttgcactttcctacaaaattataaactcaccattaaatacaattaattaaccgttaactaatagtaattaatggttaaatggtacaatgtgttgatttaaatgaagatgatcaatgtagtattggcatttattgaatatttcattgtaaatgttaagaatacttttaacacattcgtaaacctcttcactcctcaaaattgagttatacacattactgttcaatatacactttaacaatacattcagaatcaatttattatacatttccattacattttctgaacacattattactaatattatactactagtttatttataatagttttaatagttatttgaaaattaccgttttgctgatgtgacataatgaagtagtaagatgccttaaatgtgataaaaaaggtgaaaaagtagttgaaaaacgcatttaaaactgactgcaccttatccataagtgaaaaattgagggttaaggtgttggaaaaaaggtttaaagacgaggtttctgaaagggttttaaagtggttcatgaaaagatcctcaagtttattctttaaatgacgattcaaacaactgtaattcagtgttccatcaacgctataatattccacatacttaaccagtttctccttaacagattcacccagagcatcaactgaatctactgtatcaactaaaatagaatcggatgtgggattaaatgagtcatttctagtgctaccacagtttgttatcaggtagttaacaatatcagaagtaaaatcctgaagtataatgtaatatttatccatgataatggaaagagtttgggaaacattggtgttgacgaggttgtccaaacaagtgtcataatcaagtttaagatgcgatattattgattttagtctatccaaatcacttaatgtaaacccctcagactttaaaataaaataaaattcactcttattcatgccatcactcaaattactatacttggcagtaagttcattgcgtgtattggtatattgtaagaagatggattggatcgatttgatgtagttgtcccagttataaatgagtgaaagcaccttttgattagcaattaggatattttttaaccgtttcaactctcttaacttgtgagttttgtcatatttactcttaatagcaagtgataaatcctcaactctcttcaatccagtgtaaacactttcaaataattgtgaatcagtgggagtagaatttttagatttttcgtaaaataaatcatacaatcgagttagtctgttacaaacattactttgaatcgtctaaaaaatttaataattatttaaaaatacttcaacggaataccaaatgtcctcgtctaagctatttagcctctttaggagcgcttccacatacagttcagtctcatctacaacataatgttattaatgttaaaattaccttctgaggagtttacaactttagaaaatgctagggaatcgtttaaatcaagagatattaaggaatttaagtaatccttctcagtacaagttagcacttttcgagtagattcacctgaaactaactcattttcaaccattattaactcatcctcaaacattaactagtatatacatgttgtttgggagtgaaataaggttatatgcgatagaggaatagatttatttaaaaaacatattttgtagaggaaaaaataaatataaaattaaaccataaattaaacgtgaaatgtgtaaaatacaaatgtaaaattgtgataaaaggtgtcattgatgtgtggggaattaattcattaaatttcatcattcaattattatttatttaacttcggaatatatttcgtgtaaaattttaagatgaaggatactgaggaggattccgaagaaaagaaggaaaccgtaccactttctgatacagaagttaaaattttaaaatcatacgtttgtttttttgatttttccaattatttactcaattagttattattttgctttttttttaccattaaattttgttaatcaattttatggaatgttatttagggagttggaccttatgcagctccaattcgtgcagccgataatgatataaaagaagttattaacagaattaacaaactatcaggtaatttatcttccaatttactcattcaactcatttaatcaccattaatatggttaatagtgttaagaattatgtaggagtgaaagaaagtgacactgggttaaatccccctcatatgtgggatttggtacttgatcaacgttccttacaggaaggagcgccactacaagtagcaagatgtacaaatattattaaccctggaacgccacaagccaaatacatcatcaacgttaaacaaatcgccaaattcgttgtggtattttttatctaattattatagtttacactatttaacatgttaataatagttacataatgtggtatgaaattggtttagggattgggtgagaaggctgcggctacggatatagaggagggtatcagagttgggtaagttaagcaattgattatttattttagagttgaccgtaacaagtataagatacagataactttaccgcctaaaattgacccctcagtaaccatgatgacagttgaggagaaaccgaatataacatacaacgatataggtacttttatggtgttataataattaataggtgggtgtaaggatcaacttgagaagttaagggaagtggttgagatgccactcttacagcctgaacgttttgtacagcttggaattgaccctccaaatggagttttactatacggaccaccaggaactgggaaaaccttgactgctagagctgttgctaatcgaactgacgcctgttttatatgcgtcataggatcagaacttgttcaaaagtattctcacactatataattacatagttaatattatagtaacagtgttgaatgatgaaattagatatgttggagagggagccaggcttgttagagaattattccagatggcgaggagtaagaaggcttgtattttatttattgatgaagtggatgccattggtggttctagaggcgaagatgcatcaaacggtgatcacgaagttcagagaacaatgctcgaaattgtgaaccagcttgacggctttgacgccagaggcaatatcaaagtactaatggccactaacaggcctgatacacttgattcagcacttctaagaccaggacgtatagatcgacgtattgaatttggattaccagatctagaggttattttttacccacttatactattgtttatactattgtttatactattgattatataacttttaaaaaaattttagggtagaaaacatatatttaagattcattcgaggacgatgagtgtggataagaatataagatatgagttgttggctcggctttgtccaaatagcacaggagcagacctcagaagcgtgtgtacagaggctggaatgttcgcaatcagagcaaggaggaagagcatctcagagaaggatctgattgacgctatttctaaggtcattaaaggctataagaaattctcggcaactggtagatacatggtctataactgatttcaactcaaacatattttatcgctattaatcttttaactattatacttttgacaatcttttcattattatgcattttcacaattgtactttactatattttcactggaatttatttgaaaatttaaggaatgagtacaagtgggagagtttatgtgtagtgatgttgtgtatttaagagttactagaaataattcatcgcataatgtattttataaaaaaatttataatctgtactagtaatttttattattgtgtttgagccgttttgagccaaatttaccctgtattttagttttttatcgatcttttatttttttctcaattctctcattatttttttagttttctcaatttttcatttttattcctaaaattacatcactttaactataattccgataataatagtatgatacaaagaggataatgattagatgggaggtataagtggaatatacatattggatttgaaaggaaggctaataatttgcagaaattataaagcagacctgttaacgaatgtttgtgatgcgttttacgagaatgtgatattacaggattcgagtactctgaagccagtgttccacagtgatgggtgtacgttctcctgggtctcccagaatgggatttacttcatagcagtggcttcttctaactataacgtatcactttcaatctcgtttttgtacaggtttgtgggtgttttaacaagttactttaaacacctaaatgaggagagtataagggataattttgcaattgtgtacgaattattggatgagatgatagataatggttttcctcaagtaactgaagtaagtgttttgagagaattcattaaaaaccaatatcaccagttaacgcttgacaaggttcgaccacctacaaccatgacaaactccgtttcttggcgcagagaaggcattaaacataagaagaacgagttgtttcttgacgttattgagagtttagacctcatcttatccgcaagtggaactgttttaaggtctgaaattaaaggctgtttgaagatgaaatcatatctgtcaaatatgccagaagtgtttttatgccttaatgataagcttttattctcagctgattcgaatacaatgggctcagatactaatgggaattcagtaaaaagtttcgtcgagttggaagacgtcaagttccaccaatgtgttgaacttacaaagtttaactcagatcgcacaatcacatttataccgccggatggtgaatttgaactcatgacatatcgcctacgctgtagagttaaacctcttttctcactctatgtaacttataacagtaaatccagtactaggatagagttttacgtaaaagcgacttcacagtttaagtctaaatcaatggcaactaatgttgaattcctgataccagtgccgtcagatgttaattgcccagagtttaatccaacccagggaagtgtaaagtatttaccagaccaggacgcaataacttggtatgtcaagcaatttcaaggagataaagtttacacaatgttcgcatcgtttggacttccttcagtctcagatgagtctaggaacacattttccaagaacccagttaaaatcaagtttgaaatcccctactacacagtctctggcatcaacgttaaacacctcagaatcactgataaaactggatataaagcccttccatgggttagatacatcaccaaaaacggcgattatcaacttagaatggcataatctcatattcccaatcttatatattatttaaatatttttgtgtatattattctaacatttgtcggttaggaatgcgttgacccaattgattagtggatatattttaagaaacttttaaatttcaaatgtgttttgtattatatgtcagaaactgaattgttgattctatacttggtatttgtgtatctaacagtagttacaggcgtagcgctcttgataatcacaatgtaacttgagtatcgcacaatttccatgatttcaaggagattttttagcttcctgagtaaatccaatggtaataatttaaatcttgatgttttctcaaaaaatggatctcaactgtcacaaaccatacgaatcgcatcccaagtactgttttacctatttcacattgttttagaaaagatacgacgatttaaaattttggaatttggctaaaaccaggtttcagtacctatataaaggtttaaatgggagaaatctagcctttatcgcaaatggcttcgcacgagcaaatattacagacaattccatctggaattctatcatttcaagatcaaacgacattatacatgtttgtttacatcaatttaacatattaataatgctttaggagttggatattcaggatttagctctgttgttaaatgccatgtgtaagatagaagggatagataaggccgatttaacctatttaataatgaaaattaaggtataatataataattcacacttttacatgtaatttattagagcttaagagagtttgtccctcgatattcctgtatgattatgcactctttgggaaagttagtacataaaaaatatgattcattaggattaaaaaatatgattccgagcttgttaatttgttactggagtcaattaagccaaatttaaaccggttaaccctagtttcaatatcaaacctggttaacaggtaccacttaatccattatatatttactgagttaacatatttttagcttttacaacctaaagtactatgataaagatgtgatgaaacagctgattgaggtaattaattgtaaaatgagtgacacaacaaactacaaattgagtgaagataaaagtgttaagacattagtgtcaatttaccagggctatgcatactctggtgttcacaatagagagttatactccaatttcttcaactactttgtgagtaaaaattattattaattgttctttagcttaataatgcgaaagatttgaaaattgttgaaattattatcatagcaaattcaatgaaagtttccaaatgtcacgtaatccaacttttaatatttaatgatattatagtctgaggaactgattgagaagatgagtaagaagttgataaacagcccaagaaagtataatttggataatttatcatcatatttgcaagctttatctcctaaatattcaacaaaaggtatgaattttacaatttattctccacagcaaatgttgagaaggtgatgaaaaatgttgaagctaatcgatttactggcaattttaccccttcaaactcggtcacactgttacaagtttacaacaacgtaatttctcaattatttagtaattttcattttagtttgatattgagaatgagaatttgttaaaaatgttgatgaacagtttgaaagagaatacaggaaaattgacagaattagtaattttataaaattgttattttaaaaataggaattgatgaatgtaatttgctgttgtaaagtaattgaagaaagtgatttggagaaatttctagaacttttcatctcaatggataattcagtacaaaatttatcaagagttttgtactatacaactaagtctaagataaagttaagtaaaattgaggatgaaattataggtaaatttatctaaaaatagagaatttcagaaaaattggccaaaagtaaacgtaaaaactgtgactctacggtgactatttcaaatcttttgtgcggtctaaaaagtataaaggactctgattataaaaatgagttaataaatcagtgtatagaatatgtaaaggagaattataataaggtaacggaaatagcaattggataaaatttattagtttacgaatcagcttttagcctcgtcacttgactctataaatgaactgggaagaacagatgaaattttggacaaatttattaaaaacagtaaggatacattagtgttttaaatgtttagttgggagatttaaggagtacaaaagttatagagataatgttacattgttgaaaatgttaaattccataaactatttcaaattctccggaagtttagaaagtatcttaaagtcgtatcaagttatattaaataacgttaaaagctgtgaaaaaggagatatgaatgagggctcagaacttgaagaggttagttaaaattattaaaattgagttttagaaaattttggaggaatccagtgttattgtgcaaatgttactgagtaaattaaaagttgaaaaccgaccacacatggcgaaacagaccaatttaaattcataaacatgtaaataatgtttcaaaaaatgtatatacagatttagtatttgttgctattttacttttatcctaatttgttatgtgtaggtataatgtgttatccccatagattataggattccattatttagacgttttaaatgaacctgtctgatcgctataattatgctcatttgtacctccctgggacaggttgtatggcacacccttactgtgtgcgttcttcttgtcgttatttctgctacctgtaacattagtaggatcgataaaccttccacccatttcattagaacatccccaaaatgtatatatctacactagttactacactatttatatactaaaattgatttgttgatgtatttgtttagtgtgtgggttggaatctttgggattcatctctaatacacctcaaataaatcacaaatttcttcctcaaaagtataatggcactgaaattgttgaaaactatgtcaaaaacgaccatttccaagacctctttcaccaccatgtacttcccatgttcatggagaggcctggcacacatgtgtcaagggtttcaaagtctgaccgcagttctttggtcaccgccgacttctttggctcacgtctgaggactttgagagattcagtttcccaagtttcaagggatgatttagtaaaaggcgctactaagctttctatgctttcacttttgtactttggaaaatcacttcatatgcaagcaagcaagaaactgctaagtcttgtccccaatggttatatggcattgatattccaaatgttatcagaggtgccgtttatgacactaaaatggctggttgggtttgagtcaccacctgtgttttatcccaagcaatacacccctgagaaggttaattttaaagttgacggagttttaggcgctgttaaaaagtcgcttaaaaacggagtcaacagggtgaaatcgtacgtcatggcatataaaaccgttattttacagtctttctacggggttctagtcaggggtcttacatcttcctgtttctcttacggcggcgagggctttgtaaatttcatgaaggccatggaacctgttttctcctcagttttgtattactttatggaggggcttaagctggataaaatgtcttatttaagtcttgttccagtggtaacaggagttgcatacgccacatattccaagtttacaccttcattaaacgctcttacatcttctgtactctcatttttagttatgtacattaagaaggatgagtcgaagaagttcttttcccaaaatatggacaaagttgggaggaacctaaccaggagcaatttattcaccagcgtttcaatgctaaataatttgatggtatcatttttctcactcctcggaggagcaggcacagggttgacttacgcgtatgaaaatgtgctcaagaggttacatagcggtgattatgacttgttaaaacatctattcgtaatgggactgactcagtacatgctaaaccaggccaactacactcttttctcaggactatcaccagtatctgcggcagttgcaaactccatgaagggtgttttaaacactctggcagactccgttttcaaagaccacaagctatccaagcaggaactctacggctcagccctagcaatcgcaggaacctttttatactcactcacaacataatttttaattccctaaaactaatgtactttatccaacatttatcatatatagtatatactataatatgcatatattgtgtatgtgtatagtagtttgggtatacttagtaaataggtgtataaaattatctgataagttttcttaaaattttcttttcagggtttaacggctcttcagtgatgtcaaagtgaataggctggtccaattgtttaagttctggaggatatattttcttttgtactatccttgcaggcgtttcctcaaggtcaggtttatacacatcttcgtcttcatttacacaaggagtttcctttagaagaaaattctttactctattcaagtgaatacgttgtctgttttcaacaatttgcgataaaaggtgatagtgacccctggttctctcgccaaatttaggcggatgagggggaatgaggttagcttgcgaaagaactgtagccactgagacattcatatcacatcctacacccagccagaacttaattctactgaatcttagtcttatttcggataaactctcgtgattttctccgatagctgatggaattgggttaattggtctccgttgcacacttcctaaaacttccatatgtttaccatctctaggatccctctgattagctgcaactaacattaagaatctcttccctaacaaatttaattaacagaattttatcatacctctttttcccataacctggaatcttagcctaggaggacctctagacttggaataatatggtaaaaacagtctatttatcatcttaacacatatttaaaaattatttcattaaataatgtacaacattacatcatttaatcactaaaataatataattgtgtattgtgtataaaaaattattggctggctttattcacgtataaatcaatattttgcaatattggcctatagtagttattctgtatattttgatcattatttatatactctggcaatgcggatttaaaatttaaatatgactcaacacaggattccactgtggagtaactgagcgctgaggaaatttcctccaccagattattcctaaagttcagtattactgttttttccaacaaatcttttatatttaccattttttcaaatttcatcacgtttttcaaaacttcagagactttatcactaccattatcaacatgattattatccattggataatcttttaacttattatacaaaacattgtaaaccacatcagatgagtttgaaagtaaacttgaccaattatttagaatctgtaacaactgatcaattttttcaccttcatttaagtttaaatgtgtcaattcaccttcaaatttactcacaaatctccttgtaattacttcaatttcatcatcatctaggaattctaagaatgggaatgttaccatatggctggtcctgaaattggtgtcaatttccttacaaaatttagaaaccaaaaacttatttactgcgtttaaatcagtctttacagcctttatcatgttataaattccaatacatttttcaacattttccaaattaaggttcgacttgtaatatgttatcaaattgttaatcacgtaatagttgacacaatccatcacagtatggtaaactgcagggttgcttaaaacattttcatttctcagtaaattacttacaaaatccaaatttgactcatttttattcttaaattttgttttaaacattatttttataatcttcttcaacaaattattattatcaactaaaatcttgattattttatttattaactcttcttcccttagattatcttcagatgttttttcatcagttgacattaaacttgataataactgtttaaaattatcagttaccaatgatttattatcatttatattatttattactgattgtttgctatttatattactattcaggagtttaatgtcaagttgtatctccatattattatcagttaacttctttatctctaagattatttcatgtttcttatgatttaatttcctatagttatcttgagccaaattttgtctttggggcgattttgtgtaatcttgactcggtttacgttcttctggaatatttgagctagttcctaaatttcctcctttatatcccatttttttaatcatgtttaacccttttccatacaattttgataagctcgcgtcgtttaatacgacgctaggcttaggtttactttcttctaccggctcctcatttatttcggcatttaggtttaataaacctccagatataaagcttatgtcttcatcttttattttcgtttttttcttacccctttttttattggcagtccgatttctgtacttgttattgttgttgttgatgtattcatcatcagaatctgtttcgagttgattactatttaaaataatatcaaagtcatctaaatcctctgaatctgacatttgggaaaatatgcgataataaaattttaacgaggctcagtgtcaccttttatgatgacttacccacacatcaccagatgttttaacttatatatttaaaattgttcaaattttgctgtaaaaatgtacaatattttctattcactaatttcgctcatccttctatcaaatttcaccatttttgcccaggtatttaatctctacatttgctaattacttactaatgcttatttttagaataactacaatgttaacataattttcaatggtgtcatgtacaataaagatgttaaaaacaatgagttgctatcggctattgattccataatcaaggagcaaaatcttgactacaaatcaatccttcaacatttgaactactacagcatctaccatcaaaacaaactcattaacaacctcagcaaccttaaattcagtggaaacaacaattatttatacgtttactacactcaacaagtatttttaaaattattttatccacataattaattacacccctattaactatactcattatatttaacctattatcctttcctaataaactcaattatattttttcagggcttgaatgagatttacctgagtaataatataaacaatttactgaacctagttaaaaaattcacaaataacagtgaaatgtacactattattgagcaagttttcaaatcggacttcatcttttcaatgctacacgtacccttatctaactgttatattctaactcatcttcagggcctgttgtttagtaataatggtagtaaaaataacaaccaaaacagtttattgctaaaattattgttgaataaattcgataatgccagtactcccactagcaaggataaagccaaggagaccaacgacaaggaaaccaaaatcagtaacgttcttgttagtaaattttacttaatttacccaaattatttataacatatctattgttattaatttaatgttgcagaatttaattaaaaagttatattaaagtcgattcccaagtttccgtatggtagtcccttcacgaatccgttactccccaagagatgtgaccgattatcaggaatgcagcacagctcgacattgttcgttttactacagtaattaataatatcgtataacttactcgatgtgtgaagtagttagtgttaagttggtgtgtgggatgcgataagtgaacacatacgttaaacgggacccgccggccttcttactaattatattattgtatctctctattttcttctgctgttttgaaattaccttcatcaagtctttatttgcgccagacttgccataattgttgtctgcttccgacttagcgtgtttttgaatatttgttaaaattaaatttaattcgtacagcaaggcgtttttgctaagggctaagttctcgttttcagaactaacctttaactttatgttataaaaacccaagagggagttcaagttattaaacttgaggatgtttgggattaaggagccgaggttcttactgtagtttccaaccactagtgtaacagggttattggttgggtccttgaagaagaggttaatgtagtatatcttcaagttatttacattcaaatttactacggagtagatcttattatacagactgttgtacagctccacaaacatcctcattctctcatcctcaaacaactggtttgagttcttatttaaagcatcttccgttaactgtaaatatagtagtaaagtgctcactacagagctttcgtatattttacataatttaaccatatcctcattcatatcgactctagtgctcatttgattatcaggttctttttgttcactcttaacctctttatcattaccagtggtggtagtaatattagtgttattggttttaccattagttttatctgggttactcttatcaatgttactggtgtcgaataaaaaatcaatgcttttgaacttactggagacatagttgagaagagttaaggagtagtaactggctagttgatttttaacattttcaaaatactttaagtcagagtccttgacgccttccacgttaactcgatcttttaacagattcttaaagtacacaccactctcatccaataaacgctcgccactggagtatttattattaaccatagaatacctgaaacccttatttgtaaaccttacacagttgcaactagtcaatactaggaaataacaaaacagtatcttcttaaattcagtcattttttaatagatcaaattatatcctaagcagccctaacagtccttccaaagatctatgtcgaaattcctagtcttctcatccactgtgtaatcttctaatcttaactttgcaaacattggtcttctatgacattgtgttcaagtgtgtaaacaattaattttttttgaatagaaaaaaagttataaaaatttaaaatacgctgatttaatggtaaaattttggatagatagtgctccacataactgagcaacaaaccacgtaatctttatgttataattttttatctaacttttaagtttgtgtttgttttttatatttatgattgtttacatttagcctagttcatgtaattttacacccttcataattgtaaatccttaaccatttgagcaatccatcgctttaacattttttataaaatgatcaaagccaatcttcccttttcaatgacactttaacgaactcttaaaaattgtaatatatcgtaatggaaccttccaccggtgaggatgtgaacgaaagagccggtgacaatgtcaccttcgccggaaatgaaactgagggaacaacgtccagtgatgaaaataatataaacagaccttcaaatgaggatttaaccctcaacaccgctgacagcaacgaagtattcacaataaatgtagaaaatgaagcgcctgagcgatctacagaaattgagccaaaacggagtggcgcgagcgaaactgagaggcaaatatccgccagtaagatactatcagcccccagttacccggcgtttgctgatatcatagagatggagacagtccagaggctgagtaaatcgcacatttacgcaggtgacgtgcttgagttggtgaaatcgcgagatttgacaaagttctatgaggctcaacaggcagtagaacttgttcagccgactactggaaagtctgaaatggctcatcttcctctcccagatatcatgaacaagtttggtttagaggatactgaacaggggttatcagactcccaagtggttctaaacagacaactttacggtagtaacatactagacctgggtaagaaggacccgatttggaagattttcctatctcagttcaagagttttgtgataattctgcttttcatagctgcaatagcgtcaatagccctgaagaactacgttgaaggcgcttttattattttcattgtaaccctaaactctataatggctacatatatggagagatcagcagctaacgttttagagaagttggcccagctttcaagtccaaccgctaaagtgattaggaacaacgttgaggttgagattgacagcactgaagtggttcccggtgacgttttactgctacaaactggagatacaattgttgcagatatgcgcatgtttgaggtgatggaggtcagaatcaacgagtcactgctaaccggagagtctgttgatgttaagaagacagtcgttgcagaggatctggatagcccgtttagtactaacctttgctttgcaagcaccagtgtagtttcaggctttgggaaaggaattgtagttaatacgggaatgaatactcaggttggtaaaatagccaaacagcttaaaaaagcctctgaaaccagtaaagttacaccactccaaagagctcttaacaggctaggaggaacaattggtatcatttctacaattgttctgatttcaattgtgattgtagcaattttcacaggttttgatgatcccaccaggcctaacactaatagaactctgtcaattgtccttttggccgttggatttgcagcctcatcaatccctgaaggcctgccaatggttgtcacaatttcactgagtttaggagctaaggacatggcaagagaaaacgcaaatgtgctaaaactgccagcagttgagacgcttggatgctgctcagtggtttgcagtgacaaaaccggaaccctgaccgagggcaagatggtgactaccgacatcgtaattttcttcaacgtcaagagtgtaacctcagacaacttgctcaaaagcataatcaaaaacactaatttcagcctcttcggagcaactgcagccaatgttatcgccgaacgcttttcattctatcccactttcggatttagtccttttggcggtgttttcaacccctgtgacctcacagactcctataaacgtaaattaatccaattgtataagaagaaaactgatttcaacaccatagataataatttactctcacactactccgctaaaaataaagttgatttacaacccatgagtaaagagcctagtcttgaggatcagtcgcaaggatctggagagtcaagttcccaagaaagtttacaagcagctccagttacaagccctacaactgatagctacttaaagagtgtgatggtcagattgaacatgtgcatagggtatttaaacagctataacaccaagttggttttggaccagaataacaagtggacgtgtgtgggaaacatgacagagagtcccttagtggttgcagcaaacaagtgtggactaaagccagagttattggacgattacccgagacttgaaaatctagaagttccattcaattcaaagagaaagttgagtataacagtgcataaactgatggtagaaaacaaatttgaggagttggagtttcagcaaaagggcaagaagtatacccatgtggcactagttaaaggtgcaccggatgttctgagaccatattgcaaatacgtaccgagtttagataacggtgtttttgtcgatttcaagtataccataaatagtgacgaggacggtgctaactcagatgacgtggtgatgtacaataatgataagttgagtaatgatagtttgagagttattatgctgggtttagtaccgttaacagatgaggatattgcttatctacaaagcttagatgattcaatatacagacagcagtatttactatcaactgccaattttgatgttaccactttaccacataacagtggtaagatagtgttgatgggcgttacaggtagttttgaccccccaaggcctggagttaaggagtcaattgatacgtgtaaaagtgcaggaatcagagttatcatgattacgggtgaccagaagataacagcaatagccatagctaagcagattaacttgatcaccccaggtccagatactaaagatgacgagttgggattggagtgtaataagttacacattaacggcaaccctggcatggattacttgccagatgaccaaattgacctgataacttcaaagtatagtgtgttttgcagggcccagcctgaggataaggtagcaattgtgacatctctgaaaagaaagggtgacatcacagcaatgacaggtgacggagttaacgatgctgcagcgcttaaaactgctgatattggtgtgagtatgggcataaacggcactgacgtggccaaaggggccagtgagcttgttcttctggacgataacttctgcacaatcgtcaaagctgtcagggctggaaggaccatttacagcaatattcagaagtttgtctcatttttactcggaacaaatatcggtgaaatcgtatacctgaccaccagtataataattaacacgttaccaccagttgaagcacttcagatcctatttttgaactttctaactgatggatgtcctgcagtagctttgagccgtgagcccccagactctgacgcaatgaaaaggcctcccaggaagccaaacacaccaatcatgaccactgagtggtggctggctgggaacctacctcacactatctttgaggctttggcagtcattgcatcaattctgattggtttatatctgtgtactggtgtgattactctcaaggacttgaatgatcgttgtcgctacgttaaggttgacgattcaacgaagatggtttacttttgcagctctcacgagtatttaattactccaaagtatgttggatgggtcacaaacgtggattatttcgaccccgaggagcgtaagatgaagtgttttctgggtgcagcgaagggtagaatcgacgatttgaacgtttctaatcctgatttgcacccaaatttgagagcaaaattggagaattttgacctttcaagtttgggagggatgtctgattttgtcgaaaaggactctcgaggttggatcagatcaaatggtaagaaggacggaagcaactatcacggcgttggagaaatgggttacaaagatatcgtgagtagaaaatccaaacaggctaggacaatttcatttattaccgcagtttgggctgagatgctaagggcctacactgtcaggagttgggactacttttacaatgtttttaaccggaatccctggatgcatattgcctgcagtatttctgccactgtcacgtttgctctgacagttttccctgggctttccactgttctccacgtcgtttcgctcacgtattggcagtacattctctcaattctgcttgccttcaccactttaattttggacgaattcctctccaaattcatctacaggcgtattaagaaacgcagagcactaaaatcagctgaataatcttgtaaaatattcacttataaacggctatatatgtaggtatagtatgtaggaggtatttatcaaccatagggtattggtaattataaagtatcaacatattatgtaggtgttaataaatacaggctaaaatgttccacatctcattaacatatcaaactatatatcttgataataaataaaacatttgaacatattatgtacacggtatgaatatattaaattggttaaaattacataaaactacattggtttttaaaattaaaaatcagtctcgattttaattttaaaacgctcgattcgggttagtagttggtaattttaacttttataacctcctctgagcctcaaaaccaagtgaagcgtgctttccttctggatgttgtagtcactcaaagtcctaccatcctctaactgcttaccagcaaatatcaacctctgttggtctggaggaattccttccttatcctgaatcttagccttaacattctctatcgtgtcgctaggctcaacctcgagggttatagtcttgccagtgagggttttaacaaaaatttgcatacctcctctgagtctaagcactaaatgtagggtgctctccttctggatattgtagtcactgagtgttctaccatcctctagctgcttaccagcaaatatcaacctctgttggtctggaggaattccttccttatcctgaatcttagccttaacattctctatcgtgtcgctaggctcaacctcgagggttatagtttttcctgttaaagttttgacgaatatctgcatattgccttatcgtagaaaagattatactattgtctcaataactttacaaaagatccagcaatctcgtagattcgatccagtaatcttacagattttataaggtaatcttgtgggctgtttatccttcactaaaagaaacaagttacaatttagatttctgggtgaaatagtttaaaatgaatgtaaaaaatttcacacaatatattataaaacgaatttaaaatttattataaagttctgtgatacaatattacaagcgggatctgagaatctattttgttatgatccagacctttagcaattaattttttggtttagtatactaagaaaacttagtttttggtatcgggaaaattcaacgggagtttattaagagtctagtccaaattaaagtaattcgcagtgacttaggccactttggacgtctaatggggcggtcactgcaccatagtaatggcacctcggtttatttccccctattttactctatttttcactgtttttagtttgcttctctgatgtgtacactaaactttcgtctccagctgatccacaccacacttcagcctccaacaccgatttcggagtactaccatctacaccctgtcccacctcagatactttttacctcatttcctctcctccttctcgcaaattccatatctcatcaaactcttttcttttacccagtcttcctttagaaatacacaataagtatacatgtactacgaaattaaaaaaattaattacaccttctcagggataagtctcctctttcttggagtacaccctttttaatgagtatgttaattgccctaaataaaggttagttaaatctaggataatctaacgactattgacttactgctgaatgtacaccatgttaaggtactgtttctggagttccttaattatgaacctcctcgttgtcctctggccctttttaactaagcttaaaatcaattcttcgctcattttaatcttctgctgatcatctaatgacatgttatcgacattcagtgtgctcttcatggcttctcctgttgacactatgaatagctgaatcgccatttgaacgtgtttttctgacgctatcggcgacagttccatccttgcgaggctttctgatattctcaccagcgattccaactgcctcaacgttattggtatctttttcgttgacgacctcttatcttctctgtactctttgcgcttctggacataaaagttcctcaaactatccttcgcttcatttgacaatatcggcgacactacttgcttgctatactggataaatctcctcaacttattgttacttattggaccaaccacgttatgtttctgaacaatcagttaataacaattgagtttttgttaacttaattcagtgccaacttagtcaaatgtttaactcaaatatttgtaattttagctaataattgtcaattaaaagtacattttggttgttgtgtagtgataaaatgtgtttacacagtaacctatcgtggttcacatcctcgttatcttttaacatgaaaatcaaatcaaacctaaactaaaatacaaacttcatcattaccttgagagaattgttgttttaaagtcatgttgttcattgttgtcttgataattattataagatcctacaaaagaaataaaaggaggtttatacagataattagaaacgaggttaaaactatttaattagtgaaaaattacctagattggggtttgccgctgcaattactgaacaccttgtgtttaggattgttgtgattccggcctttgaaattgatattgtctgctgttccatcgcctcatgaatcgccaccgcgtcgtctggtctcatcttgtcaaactcatcaatgcaaaccactcctccatcagccaaaaccattgctcctccctccaacgaaaacactcccatactgtccctaacaacagctgccgttaaacctgcagcactactcccctttcctacgatattcaatattagttggtatacagagttattagtataatgagatattgcaaactaaatctatcaagtaatattagccattgcatactaattatatcaagtagtattagccattgcatactaattatatccacatatataaagtacctgaagtgtaaattgagattggagcaatgaaatcaacgaatttgagaatttgcgatttagcaattgaggggtctcccaggattaagatgttaatatcgcctcgaatcctggctccatttccaacctctttccttgtgcctccaaataaagcacaggcacaggccttctttacgtcgtctagtccataaatgctaggagctattgaactaaatttttattagtaaattaatatttgttaaaagttacttgaaaatctttgtatgtatgtccggctgtgaagctaggagtagaaggtcatttccctcatcaatgtcaaattcgtaggtctcatttacgttcagcttttgaattcctgaaatttttattaatgaaacaaagtacctagaacgtgcaaatatgagctgtttatatcagtttggctgttcggactattgttatacgaggttaatacaccatgtgcgtatatacggtcaccaggaatcaccttgtcacataaataacgagtcacattcaactgcaagtgtcttggcatatcaccagttgggacctaaatcattattatttatacagcatgaaatagttagtatataaatgtttttgtttaaataggctttagacttacatcctccgccagttcttgcatctttaatagttggacatccacaaattgacactcattaacaatgatgacatatggattctaaaaacattaatttaacaatttgaacagtagatagacatttttaaacatttaattaggaattattatatatgtgtcgataaaaaataacctgtgctgaatggcatcccagctgttgatcgacatgaatattctctcccatggtcttcattgttgcggagtatctgaaaaattcatcactttgacagtttttacctgcaggttttgggtatttgtggtcttgagatccaaagtggcacttcaattaccattttatgtccacagtaacggcactggattgtgcacaccctcatcttatgctgcgtccggttagcctgcactataattccaggaaccaccacaaatgtctcctgcttgtcagacaacagtgagcggataggagtagggcttgcgtaattgttgagaagattaatctggatgtagttgaacttttcatcttcatagtccatgttcatcctgcacacatcgtaacagaccctctcaatggttgacaaatatatcaagggtctctgagttaaaacctaaaacacaatatatttcagatctagttaattttaattaccttgacgagttcgtggacataaaacggaggtaatttttccgaatttctggtatttgactgtccttcctcattattagcctctctaagctgcttagtaattgattcctcctctcgttcagaagttgtgtccatcacattttgaaaatggaacagatcttccagtttcaactccagaaggtagttgttgttttttaaattctccaaaagcgttcttttaagcttgccttgctgcaaagacgtcgaggaataggcgttcaggaatgaactgaagtatgtgtaaacattatccaaggaaggtagcttgcttgggagtttcaggtactcgtcactgagtcctcttgacacattggtgttatatactcttccttcctgcagtccaagcattttgtttaattttagagtaaatactaaaaattaattttaatattttcttattcttttgcaattgggctgtagtgtgtcgtactcccaatatacacattaattccagactagcagacacatatgtaattactatattttatggtaaaaaattaataattatacaataattgctgtattctctgataaatcttcatcgagattgatatgactgccttcaccctccaacagtacgctctcctgatccaatacttttgcacatccagagatgcgccgttctcccccctctaaattattttattattaatattattttatcttacttctattttacagtttttgcactttggacacagccacttttccctctcactctccgcacccgcgacgttgtctggtctgaattcatccggtacgcagttgtagtgccaaatcttactgcagcttgcggagtcacacagcaagacttcccctcctctttggcagtaataacacaggaaatcgtaccacagacccagtaatttacatgtgctcttcaacatctcagttgagaacgcttgattccttatttcaacctcctttttaccgcttttttttaacccttcaacaacttcaaccatatcaacacctataattttacatgtgtcataacccttttccaggccacaggaattgtgctccatgtgataggcagtgtacaaaaggcccttgatgattacttcagagtagtagatgtatttattaatataattcctgttttgcaaatgtgccctaattttattaaacttatcatagttactcaagattttatcaattctgatggaattttcactgagcatcagctttatcaacatcaataactccagctcgtagtcttccacaccttgtttgcacacccttttacgcactggattttcatccacctgtcctgagctatcacaagaactgatgtcagtatcgctactctcaagatttaaagcttcagtttgaccaccagcagtgttatcgttgattttcttataattactgttgaaatccaagctcttactttcaactgcgttataatctgtgtagtagtcgcttataacactgttgtctaggtacatgttatcgtctgaaatcaactcatcggacccatcagtcagataatagcccaggagatttttacttggcaagggtatcgggattccaacgtagttatcactatatctattgttgagtatgttatccaaactgtaatccatattctcatttttttcaatctctttcttcaactttctcttaatttcacttccaatcacatcaacagcatcaatagaatcaataacatctgacttgcgtttcttaacggtaactctatttttattcaggccaatgttgtatatgtcttctgctgctcttattgaggtatcaaaggacccgtcgatacattgatagtatgagttactgatatattcacctaaatcaaattaaagtgagtaaaattacctgagaaaagaacccttggatcatctgttggatacggtgacttgaggtgtatgatatcttcgtcgtttgctgtaacttttgggtatgaataacttcctttcgaatattggtcacctttccagttagtcacaaaagcctcaactgggtatatcttcctcgtgacattgaatatcttgtgcaatagtttcagacacactttaagcaagccagccttggacattttctcaaatcttttactgaatggtggaaatgagtgtgccaggatacatcccttcttcccgtaacagtgtaagtttaagaactggaacctgtggtccagtgaattaaactgcatttcattcctcggccagaagatatcgcttggtttaaagcgcatgactatcttgttgtggtatcccatgctgtagttactcatgctcttaattctaccttcacttaattcaggcacgaaacttatctcactcagcaggtttattggcacagtcactatcacatacttactatacacacatttagaatcttggggttcaaacacttctaagcccgtatttgattttaattttacatcagtttcactactttttaacaccaattttacgtcataaccctcagtatcaggtgaatctacagccttttccacactattcaagtcaccagcatcttttttcaacgaaatctgtgtaaccagagtgttcaggtatataaattccttattaactcccaccaagtacctaaatagccactcccagccgtctataaccagcttatcagagtctgaattccccttaaacttctctatattaagccgtgtcagcttattataaactagttttattctccttttatacaactccaaactccttttgtctaatccattattctcgctactctggaatgtggttgtttcattagggctgacactgaaactactatagttggccgtggtactagttgttgaggagcaattatcatcacacattgaattcatgagtgattcatcattattaagttttttatcgagtaaacttgtctgtgaagatgatgacactgtgtgagtgttgagtgatgaaggaattggcagcttacacattgagatacaagtttctcttaggtctgagttgtagcccattcttgactggacaatgttgaatagtaacacctgctcttctttcgttatggtcacattatttcgattgaattcatctattatgtttctatacacaaaatagtacacatcccacagactcttgatttcatccactccgaatcctttgttctcttccacctccctaatgtaccattcgttactgtcagaatcttcacttagcccttcacaatcaacttcatcttcaggtttaagcccctcaactggttcttcattgatataactatcatccggcaacaaattattgactccattgtctttgtagccgtatttcttgaaaaatgaatgattaccatataattgatgaaacagcttgttagattgcatgatgattttatcaactatgaaattggcctttacaactgatccaaaactgattttactaccattcttatgattataccaattagtatacagtgttggctcccagttagagtacccactcaagtcacccaccagtggttttatataattagtaacaccaaggatggatttattatactttctcttgttacgtatgtccttgtaaggattgtatgcctgatgtactaagcttacaggggtctcaatttcattctgatcactattcactgaatcactaacctgggagcttaagtcgtgatcatatttgtaatttggggatctttgtaacttatcttttttaaaattgttgatgatatagttattgcagtggagatagtttggacccaggtcgacgctaatttgttcactagggttacttgcgtttttcttaaagaaagtggtgaaggttcttccaccaattctgtttctggcctccaggcacacgacgtttacttttttagactttaggtaattgaacgctgccagtcctcctattccaccccctactataacgacatcatactttgagccgtctacaatatctgagtaactgctataatttggttctgaaacattagggccactctcatcacctttagctactttattcccagttccagttttgttaaatgtacaataggggagtacaggaggttcttcaattatacacctcctcaatcttgccaaatcccactttttagttctctttttagcgggaactcgtgagggttccggttgttttggtctaccccggagtatggcacctgacacagtaagatatgtcccattcggagcgtcttgtgtagcatcaaagaggacatagtacctgttcctggagattatgaagttctgattcagtttatacttcaggatgcttaaatatttgatgaaccgtgcactgtttttagagtttgggatgtcatcattttgaaaatactgcggttgcgttttcaaccgatctaggaaatttcgctttattgtttcccccacctctatgttattaataacatccttgtagaatgcgtttcttagttgtactaatttcctgtaacagctgtttagtgttccgtccgtgattacaaagttggcatcatattttttttctctgagtaattgtctcagtttttcataatctccttcgttatagaaactattttggacgtattgtaatatagaaggttcaccatccatatctgggtcattgttaaatatatcttgattgtcattaaattctgtatccagctggtataacggatccagaatgacccgtagctttacggaaatcccgattttattccaaattggtctaatatttggcacattgaatctttttttaagttgaatcaggacatttaataaattttcgttgttaatgtacaaattgtaattccctccaacctcatcgctagattcggctttcggctcgtcggtttcaaattcgtttagaactctttcgtatgtatgaataattgtgttggatatatttttacactttttatagtaatctatgtaactaactctcaagtctggattaaattttactttgaacggcctactggtggtgttttttattgtactatgtaattctaatctttgcttatctgttaatgttaaatataagaacagccagcggtatttttcatcgtcagatattgaatctatacaacagtcattaatttgcaacctacctgactcggcatggcctatcatttagattctcagacacaaacatatacttagcgtgtaaaatataattacaaattaatgtgtatggggaatactggttaaatattgtgtaattgagtatattccgtattttgatacgtcgcccgataaacctctcggcaaaccgtagattacagatattaaataaggctcattatatttcatcttcttgttcatcaactcgtctacaaattatttgttaaattagatccaattgagaaataaattctatgatgtgtaataaaattttgctcaatttgaccaattgtatcaagagcgctgagtataaacttacagttgtatagattattggtcagtaatttaggctgtgattttactggaccatttttggttattgtgactggcgagtaaatgggttctattggcagcgataagtacttctttttactcttaaacccatctgggtgatacatatagtgggtatacgcataacttctctttatacattgatcatttagaaacctgaaataaataaattattaaataatttgaaaaatacttgtttgtatgtgattgcgtcgtatgcttaatacacaacggcttgagtatcaagtactggagaaggttagtgttgatgctgttgttcagcttatacaagtttatattatttaaattagagtactttatgtaacatccactcaacagacagcacattgggtgaaagctcacatcacacctctcagacgtattttcctcattacaccctacttccactatcttcatttccccaactccgtttagtttctggtccagatccactttattccttggcgacttatttcccttagttggtcttaaattattatctattccgttaagatctgagtaggtgtggtttggagaactatctgactgtgagttttcgaaaccctgttcatacaaaggctgtgttgaacaacattgtatctggattccccctatgacgttacatatggagcagactttcatgtttgtgaaagcgctgtttgatgttagggagaactggttagtctggaagttaaacgtgatacttggcataatgaatgcgaggcagaccaggtgtataaacttaacgctgttgttgacgtagatgatcttcatcgctcctccagaagacagacatgagatgcaaatagccgtgttatagttattttcaaatttcctctccattaaacaggggtcacagaaaaaagcagtttcaaccacttgattattactgttgttggtgttatttgtcgatgttccactagtgccatacgagggtatcgtagagttgtagctattggaggcagcggtggaattattattattatttgcagtgggattatagcagttgtaatggactcgtataaagcatttctggcactgcaatagaatattcttgtggctcaactcactcaacaaacacactgagcagtactccaagtttatgttatcgttgacgttctgtttaaggctctcatccaacaagtcagtagacccacgcctttcactaccctctccaatctccgatgtatctcctgagtcacttctcccgtcaaacgcctttagcctatcaagttcctcatcatcatctaagcctacattattgtagtgcagaattgattttttaatcgagaaaagaaacttgttgtagtgaaaaagaagatttgagaggttaatgtagtggttagttgccgttttattatatatcaaacccttgtacttctcattacttatcctctcattcatggcaaccttgtgcttctcaatctcgttctttatcaacttcagtgacctcactatacacgttatctgcctctctacaaatccattttcggtgttttctgaaagttcgtcctcttcatctgtgtcttctgaacccagacccacagttgggttaatgctccagttatagccgtacagactcacaattctgttgtttccatcctcctcagagtcttcatggatcgtgtcgttttcagactttctagtatatatgaaggtcatgttactgttagagcctctgctgacatggttagctgtgttaccttcagtgccattagtgagattactatcacttaacggattaattggatttatcgtacgagtgttaaagaagtaaattgagttgacgatgtacttgaggtaaatgtactccatctggctgattgataaatagtggagaattaccagtttttcaaatttatatttattattatacagtttaattattgacatccagatatacttgttatacagcttaagtagtacaaatttcggctttttatacacgacgttatatatttcatcctccagtagagtgttaggcccagaatactgagctgggagctttggggctgtgttagggtacaacaactgccttatcacattcacgatattctgtacaccgtactcagtgttaattaccagcttcttcaaatcgttaacggtgagcatggacccgttatcggcatttagcagggactttagatcctcaactatgtccgagtagcattcttcaggttgtggtgtatacggagtgccatgagtgcttgacaggtgtttatttgaagtgtacgattcagacgtgttagatatgttagaattcagtatctgggtggtctgggtgctggtgttgcgatgagtgtaaatcgggatgaagagaatgttgaaatggtttatattaataggcttgttattcttaattatgttcgactttttataaatattatactcgtagatgatgttgtttatacccacattcgtggtaactccaactgggtgaggtcttggtgcatgaggtattgagccatttacaggactagttccaggagcaaacgagcttgtcgtcgtcgtttgaactgcaagagtgttaaatttattttgtttcttgttagtagcaggcttaatcgtaggtttatggacgtgactttgtacattaaactctgcaatattatacaggtgattcacgaatgtatgcttgacatacgcaatgttttcactcttgatgtggttatagcagagcaggaaccggtaactaaccaatttctccttactgttggatacttgtctagttgttagtcctgactccgttccattcgtcatgtactgtgggttaaactgggagtagttggagtagatgatgatgtacccattacccgagcaattgaagtgcatatagtttttacagtttttcactaggcatttgaagtaaacaccagttcctccacacgaataacatattttctcttcgtcctcatcacctatgttcacatcatacaggatgtgcaggcttattttctcagacttcctatcatatgagtatatactatttagtgtatttctgggcttggaatcgccaatgccgttgaaatttgcgatatcctggttaccgtttaatgcaactccttccagagagttggaaggtgtcaccaaggctctattccctctggcagatcccaaagaattatccaaatgtaggtcattactggctttattctgagattcagtgattaaattaaaaaactgatgaaaaaaatgtaaagataagcattcggaatgagcataaaaagttatatttttgtaaacaaaggcaatattagtgtttatgttacatacttgacattttttattttccgttataatttttgtcaagttggaaaacataaaatattcgaaagaaaaatacagatcatcggtaacttccttatacttcatattctttggatttattcatctctatctagatgggggtttgaaatctgaattattttatatttctatcacacaatatggttgaaatttacagtttttacatattttacagggtcaaattaatttactccaatctgtacaacaataatgtaaaaaatgctattgaaaatctaacacattccaccacatctcataattcctcagatgtcgatggatacaagacttacgagaaattattgattggttttctgaatggtctgaagtcatttagtaagactatctgcgagattaatgagatcaacaacttcaagggcatctctacctcttatttcaacacttgtactacacatgaatataaaatacattatttcgagacaattacaggtaaaactctcctcttgtgtatctatatactatatttaattttcccaatcctagttatgtagatttctattaggttacaaattagtctgcttaacttcgtgcgacgttcctagtttggaggacactctcaagtttatttacactgaaattttaaccaacttaattattgtaaaccctacctatatcgtgggttctaccattgaatccacagattttgacaagttaattaaaaaatcgctttcaactaatatttaacaattttcttcaattcacaattagtttattttacacattagtctacacatggtatatggtgttgttgtccatctcttttcgacaacgttatgtacagattcggatatttgtacgtgaattgtattattttcttctcagcctctttacactctcttctgctcttcaactttaccaatatcgcctccactttatcaaattctaccattaacccactcttcaaaatttctctagtgttttcatcattacttataattccaacatcctcagttgtactttccctattatataaaaagtgtaaataattgtttaattcctgattgtaattgatgaactggtcctggagatattcactcaactgagcattttttttacttctatgtcgttgcaatctactcagaatatcacctgtttcaccaacataaactatcaagttgccagtttctccatcttcaatagtatcttgattatctatcttattaggcattccattaaaaattaggatgtacagtactggcgagtttgtaaagcttgggggaggtaagttatcatgggatagatgcaccaagtcacggtcaacattaaatcttgttatattgtacaaatagtttattagcatattcactttatcaacaactttaggatctaaccttttcaaggctctgttaatctttttttcacctacctctctaatgttctgggtattagtgttggtattcattgggtaattatcgtgtttggaaggacagtataggccaagattacttaaaattgaagtaaaagacgaactttcttccacttctgtgggcttatctagggtccattgatttaaaattgcatgtgtaacatgttcgtagaaactctaaaaatcataaatttgtatacacaatacctgcagtgttactacaaagtgtaaaactatttgtatcacttgtttgtaaggattaagtgacttttgtaactttgagataacctctgaaactctatgatctagtacttgggattcgttaatgtactccaacagccttaaatttacatcatcactcacataacaactaattaactttttgtcttcaacaacctaaaacaacgtaaaaataattaattacctgtatggtgttcaaattcacatggttaactttactggataatctctttaggtatataatgttatcgttatagcgtatatcactagtcatgttattcttgaagtattcactagcattcccggggtcggagtcaacaaacttggtgtaaatttcattcaataatctttcaaatgaacgttcaactctgttcaactcattaaccaacaaatctctccttatcatctcactcttattcatctataaccagtatgatcaactgattaaaattttaaataattattcaaactatttagtaaactaccttctgtatcagttgacgggttagattattttgcggttttggatgtttcttgtcccagttttctgaaacatatgaattcacaaccttattcattttagcaaaaattttcttaaaattttcgtacttgacactcacattcaaatcgttaagaacaagatcaaaaagtaggggaataagtttgttagggagattttctgagtaatactcatacacatcaattagtgaaataagattttctaggctcaattcatccaggttgtagacgtttttaacttggaccattgacactgttagacctgagagtatcttatttatctcctgtattgttccactcaactcctttgggtatctatacagcagtctcttaaagtacttttttacgtaactgggtgaacttggtgatacaacttgttcgtgaaagtcgccgagttggttaataactctattatccaggtaattaaatttcccagtttctaaattcccagaatccactctcttaaccttaaagttaatttttatgttaagcctcgttataatctcctgtaaaactgacatatgaaatgaatctccgatacatccaccctaaatattaactattcaaatattttgttacctgcataatatgataatgtagaacgtttggcaagtttttgaagactgattttatcctagctgatccatcttgtagaataattattctgttattaagcttatttaggtaatcttcaacacatatttcatttaagttattgtatattgatacatcacctttcaaatctatcacgctaagactatagccattctcatcaaatcccagtccaaccactttattatcacttttagacacagaatctgtggttatttcaaatccttccaatttatcatttgattctatagttggttttatatcaccggaaatacatgtttgagtttcatccctatcatggtttaatttgtttgaatagtaaatgttagagaggtagaaggatttattttcacttgtaaatatgctcccatttaccaattcttcatacacatttacatcaattccagcatttagtaatttattcacgacttcttctagctctgtaacaggaaactcaacctgtgcagtccctcctagaaattctaaaccacaatgttccactaaaagtactgaatctgtatcaaatgactcatacttctggccatttcttaataaaattacattatttggataaaccttcttctctgattttatgaactgcgacaagaagttaactttattgtttcctaagtatggatttctcagagataacacttccagcattttccttgcatttttgttctttattttgagcacattttcgttcaatagcagggcttgcttatctagaatcttttggttacacagcccaactgaaatgtgtaaatacttcttaaaaagtaatttacattttaagggatggcctggcgtccctttaattattctacaaaacatctatcatatacacattttactattttactacactaatatccagcacattcaacaccacaactacacatataattctcatggatatacacacataatttgtataaacacatataattgtaaataaacatatagtttggagaatatcaatttaaaattccaaatccgttgagaacttttgttcatggtgattcgccatgattccagccttttggtattctcctactcgtttttcgaaaaagtttgttttcccctagaatttccatgatcaaggaccactacttacctgaactgatatcaattgcatccagtcgaatgggtttgtaacgttgtataccggtctaactcctagagcctgtaggagtctatcagccacgaattcaatgtattgcgtcatcaattctataagacaatgagttaaaattttcttacgtgagttcattcctatcaagtcacagggtagagagtcacatatataactcctctctaccacaacagcctccttaattatttgctgaactgcttcttctggcaatttatgcttgaggttatggtatatgaagcatccgaaatctgcgtgtagtccttcgtccctcgcaatcaactcgttactgaatgtcaaccctggcatcagacctcttttcttaagccagaaaagagcacaaaaacttccactaaacaatattccctccactgctgcatacgccacctaatccacaattaatttttacactaattattccaactaattctacactaattctacaatagttaagtataataattctacactaattctacactaatttaacaatagttaagtataatgttgtgataattgtgtacaattctttctgcaaatgagttttcatctgtgatccacttttttgcccagtttgccttatcttttaccgcgtcaatcgtctcaattgccatgaacagtctcctcttctcagcctcgtccttcacgtagttttctatcaacagactgtaagtctctgagtggatgttttccactgctatttgaaatgagtagaagctctgtgcctctggaatcttcacgtccctcagaaacttcagggctaaattctccaaaacaatcccgtcgctaaatattcataaagtcctttcaacacaccttgctgcaaaaaacgccaatacgtttgtaatgaagtggcgttcatctttatttagcctatgccagtggttgtaatccattgagaaatcgatttcttctgcagtccaaaacgacgcttgggccttcttgtaccactcccagaactctgggtacacaattggaaacaaactctaaaaccacggttaaatactccaccaaagtttaaaaattaaaaattttatacttattttcttaaaattaccaaaattttaatataattattggaaattgagttaatttttacacatcttattcagtgaagtatttcatgtttgattaactcatttaatagaatataaatttgaaaattaatgaagttatcattattatagctgactgagtcgttaccgttctatttgggttgcgattgagaagaaactcttcggcttcaagtgccttcattctttcgctgagagtactcatttttactgcagaattttaacaatttaggtaaaaaaactaaaatattactgtttaattaatatttacaaattattttttttatttcattccttacaccgttaccccgccttataatccacgacgcatcaaattacgaaaacattgatattgataatacaataaataatgtgaatatatattatgtagtactgtgtagaggtaatagattataaacttcatttactttttggatgctttgagagctgatttggtgaccttggcagaggagccaggttccttcttttctacagtcttaataacaccgacggcaacagtttgtttcatgtccctgacagcgaacctaccgaggggcgggtattctgtgaaggtctcgacgaccatgggcttgtttggcttgagggtgaccatagctgcgtctccgttcttgatggttttggggttttcctccagtgtctttccggtacgtttgtccatcctcgagtggatcttatcgaacttacacgagatgtgggcagtgtgacagtcgacgactggtgagtatccttccttgatggttcctgggtgattgagaactatgacctgtgaatcgaatccattggcctcctttgcgggatcgttcttgctgtcagatgcaacatggccggctctaatgtctgaggtgctaacgtttttcacgttgaaaccgacattatcaccggggagagccacttcaacaacttcgtgatgcatttcgacggacttgcactcagttgtgatttggcttggtgcaaaggttataaccattcctgctttaagttgaccagtctcaacccttcctaccgggacagttccaatacctccaatcttgtagacggcttgaattggaagacgcagaggcttatctactggtctctttggtggttccataaggtcaagtgcctcgactaggattttccccttgtaccatggcatcttgtctgacttgtcaatcatgttatcaccgaggaaacctgagattgggacgaagggtaccttctctacattgtatccaatcttcttaaggtatccgcaaacttccttctggatctcgttgtaacggtcctccttgtagtcgcacttgtccatcttgttgatggcacaaatcatttgcttaacaccaagagtgaaagctaacaaggcgtgttctctggtctgaccctcttttgagaaggcggcctcgaaaccaccactctctgccgggacaaccaacattgcgacgtctgcttgggaggtacctgtgatcatgttcttgatgaagtcacggtgtccgggtgcgtcgataacggtgtagtagtatttaccagtctcgaatttccacagggtaatgtcgatggtaatacctctttccctttcgttcttaagtttatccaaaacccaagcgtacttgaagcttccctttcccatgtctgcggactccttctcgaacttttcgatagttctcttatcaattccaccgagcttgtagatcaggtgacctgtcgtcgtggactttccactatcgacgtggccgataacaaccaagttgatgtgagtcttttccttacccatctttttggtttataaatattttaataagtgttctttccgggcttaaaactaacaatttattatgttataacttagtctcgaaaaagaaattattgaaagtaatgttaaactgctttatttcactaaagtattaaaacttcgacacaattttaaaaaataaactggatcctaataaaaaaagactatcaatattttatataatataaataacaatgactgtatatgtgaggtattaaagtactaccgtgtttgtgggggcgattagttgtgacttgaaaattccgtacgtactcacttctcgaaattattaattacccacctcaatttgctaaacaaagatccaactcaagatcagtattaaaaattcaatagtttcctggtcaattcttaaaacacaccttaaaatttatcgtcttaacacctcccctttactatatactattttcagacaaataactaagtcttttgtgtcccatactgtttattactacattttatcgcgtcttccattataggatcgagataatctttatgtatactcttaatattctatggtttatataattctatgatcatacaattttattattttttcaacataatcgcacacttaacaccttatttttagggaatttattaattttacattttaatcttttatattcactggatttttcctgcctaatatttttatatattaatcatcaattttccctggattccacctcctcatatgctaaacaacataccgacacatctcactcatttattatcattatgtttatccaattataatacaatattatcataatactattaattaattaaaaatttgaaatgttattttattatgtgtgtttgttcaactctttggaccatatacaatgtgttacacattttccttcttttaaccccttacaccctatcttatcggtttaataatataaattttaataatgtaaatggttctaaatccttctttaacccttgttttattaatcgcaaaaactccactactcaaccaaaattacaactctctaatcactcaaatcctccaacacatgacaatagtgctaatttaccgcacaatgaaaatcgtttaacttatgataactttttaagtgatttcagaagcgaagaagttagagttagattcgctccttctcccactggtcctctacacatcggctctctaagaacttatatatacaattatatatttgcaaagaagaacaatggcaaattaatacttagaattgatgataccgactcttcaagaaataaccaaaatagccttaaagatatcttttcttccctaaagtttgtgtaaattattactaaataatataattaagttttatggttaataatttgtttagttggataggattaggatgggatgaaggtgttaataggctaaacggagacatgtattatcaatcaaatagaaaagaaatatacaagtaatttatttttattttgtcaattttatagaaaattcgctcaaaaattaattgacagtaacaaggcatattattgcttttgcaaagaaaacttcttcacaaaattcctcggagtatttttaacctatttgcatagtttttaaaactttattaacaaatttttagaggattttcaagtttaaatttaactataagtgtaaaaagtgctctaagttatcccaaaatgaaattaaagcaaagctgaaaaatctcaaatttatcattcttctaaggttttaaatagattttattcaattccactgtttaacacactatataaattgtttagaagtgaaggcgatgagtttgacgactttattttagtgagaagaaacggcgtttctacgtacaactttagcagttgtgtagacgatgttctcatgaatgtatctcacataataagaggctcagaacacacaactaatctccacaagtaccactttacacaattttaattatttcaccaatccacacatgaataattctatatgaataatctcataggcaacagtatttgtttaaattattggattataaatgtccaaaatttgtacatttgcctctgctccacgatgagcaaaagactaaattgagtaaaagaaatccaaactccaaagattacacaattactcagctaaggttagttcaaaactgctcaaaatttcattaggcttaatgggatttgcagactccctctgataaattacttaacttttctaggaactaagtatattacaaggtaattttaatgttaattatataattatagtaatgagatatatgaagtcggcgatataattaagatgttttcatttgacctgctgaataacgagcctgcggttttcgactataaaaagctgttacacctaaacagaagatacataaacagcttgagtattgaaggactgaaatccgagattttaaattttgcacagttttataatgaaaataatgaggagggtggtagaatgaacacatcactagtaatggaccaactacttgaaatataccaaaagagactagtaactctgagcgactattttaatcttgtaaactcagctctaagctacaattatgaaaatttaaccaaaaataaaggtaaaaactgattaatagtataaaacacaaatattggagttatatacatatatatcgaactacttagtagtatatatatgtttagatgaggaattggaccctgaatttaaggtatggctgaagtttgagttaaatttgatatttgagaagaggtaaacgttagtgaaaactaattaatgtttagtaaaaacgcagttgatttacatgccaactttgcgaatcttgtgaacgaagccatggttagcggtaagaagaatctgaaacacctaagattccttctaactggagaggaagttggaccatctctaatagatctggtatggtgagttaaatctaataaatgatttcagatcaaaacctggaagattgtccgtgaatgccgactggagaatttcgcaaatttggagcaaagactaattaatattagagaaattttaaaataaataaattatcttccattcattgaattttttattaaaattttacaaggttttaatgagtatttattctacatgttttggcatcacctgacaacggacgtgtatagtgatttatagaatataatttgtttattctatgcaaatagatgtataatgttaatccgggcatcatttagaatttcttagatgttttgattcaagacaaaaacgaaatgaggcgatatcacaagatggaaaagattggggaaggtacctacggagtagtgtacaaagcccagaataaccatggagaaatttgcgccctgaaaaaaattagagtcgaagaagaagacgaaggcattcctagcacaggttagtcccattattctcacttttcttagccattcgggaaattagtcttcttaaagagcttcatcatcctaatattgtctggcttagggacgttatccacagtgaaaaatgcttaactttagtttttgaatacctagatcaagatttaaagaaattattagatgcttgtgatggtaccatttgacaatatttcagatatttatacattcctcctgtaattttaacgaatattctctataatattgttatccaatcaaaatttgttgatataataatttgttaggtggtttggagcccacaactgcaaagtcgtttctgtatcagatcctcagagggatctcatactgtcacgaccacaggattctacaccgcgacttaaagccccaaaatctcctaattaacagagaaggcgtcctaaaattagcagattttggactagcaaggtactgttgacataattttcacaattatttacattaatcttaactacatataagtattgtatataacattttagggcttttgcaatacctgttcgaagttatactcacgaagttgtgactttatggtacagagctccagatgtcctcatgggttctaagaaatactcaactgcagtagatatttggagtgttggatgcatttttgcaggtaaactcataaatcatctaatttacataaaatttacataaaattaaaaaaaaatttgcataaaattaataaaaatttaatgtttagagatgataaatggagttccactattcccaggaatatctgaacaggaccagttaaagcgaatttttaagattctcggcactccaagtgttgattcctggcctcaagttgtcaacttgccagcttataaccccgacttctcctactatgaaaaacagtcgtggtcctcaattgtaagtatttactgtttaatatcacattttaggtaccaaagctaaatgaatcaggcattgatctaatttcaaggatgctccagctggacccggtccagagaatatccgcaaaggaggctctcaaacacgattatttcaaagatttgcatagacctcctgaatttctaaacggtgtacactaatctattcataaataaattatacaacaatatgtatcgactgggttatatagtagtcagttccaaccaaattacacaacagtttaataaggtttatgagaattaattgttttgttgagatggtcttttttgtagtaaattgaaactaaaattgtaaattcagctattaaatacctttccagaatctttatgtaacttacatcttcctccatagtccattcctaataataataaaattagattatcaataccttattggttagggtacactggtaatgcctggaagcctctccgctgcatttttttgtcatattgtgagggaatctacgcatacacctcacaagtttaagccttcaaaaggtgaaattattgaaaaataccatgttgctgtgcaaggatgggttttactagcactacgctgttgtttctgaagcttaaacagaatctcattcgcttgccaccaaaggatccttggagccctaacagtgccttttagaatgtttttaagaataacatttcctggttctgacccggacattgaacatttatagtacaaaatgttaaaatgattccaaactcatggaattctcaattataaataatttacaaaaaatataattttaaaaaattatttaaaaaattgttttattaaaattaaaaatattttaattacggagtatattaaattattagagtacagtttagattagtggtgtgttatcgtcggtcaaactcgggaatcctaaaattttaaatgaaagtgaaaaatacctatatcttctcccataagcatcaaatgtgtaagctcgtcctgagtatttataacattttcaactaaataccataggaatcgtatactatttgaatttttgaaccagccctcctagtaccaggcctaaactatgttacagaggatgttattattcacaatgttatatacaatggaataactgcatacagtagtatatagagtgagcagtaggaaactaacggatcaggccttgtgaaatagaagaccaagcctagagggaacataatgagaggaagaatcctattgaagaggtagaataagtacttgatgaaggtggacggatgagaatatgactcagaaaatctataagttctggaagggttaaacgatcccaaattattaaagaatctaatcttgaagatattctcaaaattcgacagtttctcattctccttctatataaagttgacaatttgtcaaatataactaataataacagtattatctaatgttatatataattgtatgggttaacaaactctaaatttctcttccatttgttcccactccctccttagacgttgagcttcagctttaaactgactctcaaaactatcattttcataaggagtttcagtgtaattgcgatattctctattaacgttatatctgtaggcttggccagttctagacgaaggtccaaaaactaaattttaatattaaattgcgttaaaaatacttgttgcagagtcatattccttcctacgattggcatcatatagtgtgttataagcttcctggatctccttgaacttagatggtgcagaaggtgaagagtttaaatcaggatggtataatttagccttctgaagatacgcttttcttatatccgtccgacttgcgttttttgcaacacctaaccacaaatatgaaattcttaataataaagttatctaataacctaaaaatataaaataaaaattaataaattatataaattataataaaatcaatgtaattatagatagaaaattctacctagaattgaataatagttcttcatataggagaaaattttgagaatattttatatttaacaaatttgggctgaattccatcttaaatctttaatttacaggtgccatatctagaagatacgagtttttcagtttatcagtatttgttcagaggaagatacatatttgaggcacaaataatatacagaataaaataaaacaataaattaagcaaaattaaaagaatttgacttttcaaaattttaacctaccaaaattaatcacccacatgtgtatcatgtgaaggctataaaaattagtaaaaattaaaaaatgctaataaaaatttttaatgtttttaatgtaaaatatgaacgttaaaaataagagaaatttatcttgtttttaatgaattattcctaaatatgaaactaaaacctgtaccatataagtgatgccatcacatttacctcaaaagcccgtaaagaagttaaagaaacccgtagaaagcagctctggaaatttaataaacacagtaacactctttgttaattatttattcctaatttaccaataatttattaatattttattactaatatactttttcaggtgactgttaaagctgaacctatagtttctacttcaaacagttagtttaaccatttatctaatattttagttcatgtaactcctcagtatagcgacttaagtactgtaatatatgtttggggaggtaagttatagaatttcataaaatgtgtagataaccctgggaaagcggatgaaagctctggctcttcagcctctgagtactggactcctacaatttatcggaacttatcggatgttaaaatcactcacgtttgttgtagtgaatcgcatatgttgtttttgacctccaaaaagctcatttacacgctcggtaatggagattacggccagcttgggcttggtaagggtataatccacgtttccgagcctacatttgtcagtaagatttctgatgtgaaacagatctgttgtggcaagttccactcagttgctcttgttgaaggcggcagactcttcagttggggtcgaaatgacttttccggccacttgagtgggtttgccaccttttcacccaaggaaattttaactaatcaggagagcagtccgggcgttaaaattgtatgtaagtgtgtatcttccagtgatttacaaaccattgctgtttgcgacgagggccgctgtttgtacttttggggcatcgctttcaacggtgagcgtattcagcacccaaggttatttttttcctttgcgagtgagcggatttgtcaaattggtgttggaacttccttcgctctcgctttaagtgagcgtggcattgttttcaactacggtgacggtacttatggcgagatttattccgaaagcacaatcaccaactccactcctattttctctcggataaaacacagtttgattcaaaacatcactcaaatcgccgttggcagcagacatgctctcctcatagacgataataaaaatgtcctagctttcggtgataacaattatggccagtgtggcacttctcaaggccaccacgctgctcctgtaattgttgaattcaccgacgctaactttttacccaaatatgtctacactggtaacagaacttccgcttgcattaattcaggtaacaattctatcaaattattatcaaaaattatcaaaaattatcaaaaaattttaaaaattatcaatatatatcaaattataattactaattaatatttaatttgatgttaggaaatcaattgtttctttggggtcattcttctcaccataaattaatctttacatcttctgtcgacattctaattcaacagcaaaagcagcctggcgtgtctatcatttcaggctacaaaaactcagtaaatcaagttagttttacatcatcaaaatctatttttagcctgtactaatatactctttgttacatgagaaaatcacttgtgccggactaggtcccaattacactgttgttatttctggacaaggtaaaaccagttaaaaacctaatttcttacacatatatatgttagtatgttatggtaaatgtttgtattttatttttatattaatttgttataatatgccatgtatatacacacatatatatataggtgtatattagtattaatatactaatagcatagtttacatactaatagtatggcttacatactaatagtacagtgtatataataatactattataaactttgttattgtgtgtaaaataagttaatatattaaaattagttgggtttgtacgaaaattcactctagttgatatttatgcctgttgagcaggtacaactcgcgagatagcaagtgggaagtgtaggtgctagtgatttgccggtaatttaaattgttttcaatctttaatttcttgagtaatttataaatgataaactcgtctccgtacaattccctagacttgttcattagcatatcatactccaggttataaattatcatctttaagctgtcttcaggagtgtcctgcacactcgccgttaaattactacttgagatgtaaacgtagtagtataaagggcccttgtaccatgagtaactatacttgtcatcgtacaggttcagatcactagagttaatgttttcgtacaagttgtagtacttgtttacgaagattttattattgtggtcgatcaatttaaatatattcctgctattggtgaagaactcgtgcccaagtatttctatcgagtttaacctttcactgggatagtatgataacaaatttgtcaacaagtttatcagtaaatcatattgcgcccttgaactagcttgaggtaccgactcctgagaatcttcacagggattaaacacgtctttatcttcagactctggattatcatcactcttggggtacagtttagagtaaattagcctcagaagcttagactttcggactttaaactcgttattgcacacattgttaatgtaggttgacaacatcctattctcgtcatccaccagcatcttgtccttacttttgtaaaaaatcccattcccgatgttattatacaggatattctttatatttgaactcttagaaccagctaatttatggttatccttcaagcctccaactctcgacatgttatgcctgatattgccagtactacgtttagggctaactttactagttttgggaacaggtctgggggtgttaatagaggtgctcgagcctaacctattagcattaagtttgccaacaccaccactgttattggcactagtattattcctggacgttgtattattatgcctggatgttgtattattattcctggatgaagtggtatagtttgttgtgttggtgttgagtccggacgctgtggtagaatttgagttttcagaggcctgaaagtttaagtcgcagtcgaagttgtcggtgatgtacaagttgaacaggttgacgttagccaagtcatccaaattattgaaatcgtagtgtatcatatactttaccagctcggttattatgatgcccagggaccagatatcgctcttattacttgtcttgatgtacctcacgttatttatttccaccatttcattcatgttcttgaggctatcataatcttttaggggatccatctgagagttttccttatcactccagttaccgtcacttgtttgacttgcagagttgtccttatcaaaaaatatatctaatgaactatcattgttgttgttggtggtgtaaaaatagtccagcagtgctctgttgttattgattctcttattgagaaactcgtcgtacagcagtgtctctggtgagttgtacttgagtgtcccgatattatatgacagtaactgtgtgtttatctgctccatgtactcattcatgtgatagttgaaaatatcgtcgtcatcgttcatcttaacgtttcctgaatattgagctgttgttttggcaaaattagtcggctgagtgctagcaacaatgttctgaatattgttgataaagttatttggctgtaaaaggatcgatgaaccaaaatcggaaagatttaactgccacttcaaagggttatacttatcctcttcagaacaaaagaccagtatgttattgagcttaatatcggtatgcctcagtatgttcccctggaaacagttgtgtatatatatgatactatttattatctgtatcaggatatacttgatctcaattataaacaacccataaaacttccaattattcctcttctcacttgactcgccattatttttggtactcgtgtctaggttacgcttggtgctggtggtagaattacccttgttattaatggtatttgtccggtatataattagtttaatgagcattgagagtaaatcgccttttgctctgggcagtagtagttgataaagcttattgttattgttgttatacaaaatcctgtaactgattggttttagtacattctggttatagtgtagcatcatttccttttctcgaatgtattggtacctggacatctctccataattattatttatgttctttatagcgcattcgtatattctcttcttctccattgtatcagcagtagcagggggaccgttattaggtgctgtacttgtattttccgtagtagccgcatcagcaggctgagcttcaccttcattattttgatttttctgattaatgaacctcaagagagccagagaaactgtagaaaaggacccgtaacccagcttcatcttcctatatataatcacattaatgtcatcattccacatttcacttgaacaatttctctccagcaccttatcatccattcccattcttgcagaatccatcgggttagcgttggttctagtacgttgattcttcagtttattcatcactacatcttttgaatggggtgccgtgttaggaacatggttattattagggttaattagtatgtaccgtttcctcttcccgttattgttgctagtgtcgttgtaactcctcttattcctcttatttaatgtgtaatttatcgtctttattaacttgtcggagtttgacttgatcatctctaaacccttcaagtttactgagcccattttcttgttctttggagtgcaaatgttattataatcgtcctcctccatcctccgtgacatacttacactactcgttcctgcattgctctgattattgttcaaattcatttgattgttttgttccaacctgcgatcgtttacactattgtacaaattaaaattattactcgattctcctctctgatcagtgttaactgtattgctcggttgcgatctgcgatcaacattagatgcattgctgaagtcaggctgacttcttttaagtttaaattcactaactttactctttccaactggtaattccttctcgtgttcgcctataacttggtccaacaccttgtctaatacaagcgattcttctggggcattggcctcttttgtttctgataccttatcctctgataccggtttcggtttgaaacgaagatcttctacaggctctggttccaacatgttatctagtctcaaattatcctccactgacacttctggatcaattggtttatgctcagatgttacttcagattcttgtgagttatctctcaaaaccaactcatggccttcagggtccgataaagctcgtttcgggtctgactgagagtcttcaaattgctcattcggagtacttctttgtaatatcgtactattaccgtaagagtccaacgtgttactactggtcgtattagttgtatcactgaactcgttaaagaagttattaatcatttgactgttgttaaggttacaaatgtaggtgttaaactttacgatatcgttcatttcaatttcattatccagactctcctttatcttgctccggagcttatcctccaccttctcggtatgcttctttaattgtttagagacggtagcgtcaggtgtggagttattgggtgcggagtcaagtgcgtcagtagtcgaggcgtttgagctatcgtcagacacatttgaagcggtactcgaggtataatttgtggctgaatcatttggactattaacttcattattagttctagttctactcttagtgataacttcactagcatcaatgttaatgctggcagtattagcgttttcagttttagtatcagaagtcttgttatttccactggtatccccccttgatctggatttagtgttactagttttagaggcagtattacatgtgtttaagagctgttcgtaaatttttttcgattcgataaaaaagttatcattatcagagttgtcttcatcttttatgtttttaaactcatctttacacttcatcgagttgcccttattatataaatttataacactctgtacatccggctcctttttcactacttcctttctgcttgatatatttacaaactccaattcagaatacttctggtcacttgtaggattagtcaaacacacttgagaatctgtacataaatcattttttacttccagatcaatttctacatctagatctttattttcagatccgcagctaaagattttaaaatcattctcaaaacctaacctagtattaagttgatgtgtaatattagtggcaggagtgtgggtagaattatggcctgtaaacccactgctacacaatctaccttgaatatctaataatatttcaacataacactctttatactctgaagatttatcattttttctcttttttgccttttgatcatcaagattttcgccattgtccaggtttctctttgaaactctacttgaacgtatacatgaggaacacaatcttttcattattttaatcacacattgtgacaattatttttttgcgatttttattaaaatttcaggggtgaatggagttttatcatcagcaatctacatttgacaaccaacacatcatttatctacacatgattctaaatgacttgtaaaatacttaatattctgtaatcaaataaaattattatactaaaccactttcatcactaaatttaacaaaaaatgattcactagaattattaaaatgaaacaggttccaaaaacgtcaaaatggaatatcctgaaataaacattaaaaatacattaattaaaatcaaattctaaattgttataacccaagttatatggaacacaaattaacctccttagacacaataacatctatcataccacgataaataataaaacatcatacacccatacacactaggatcaatcaacactattttattttttaaaagaagaatttttacatataaatatactttaaaaacattcaaccaccagcttttctttactccagtttcctacctaatttccacaacatgaaactttgttaggattccttcttcaaatttctcgttactaaaatctacaccaagtccctcttagatccaaattattattttttctacttaatttatcataattttgttgttttagaacttttccacgacaatactgttagtgatactacatttaacacattgcagaaatatagtattaatcccgttttttctctttaaaggtgtttaataatacctgatttatgatgtgttagcattcctacacagattccagttatttactaaaaaatcatctatcttcgcgaatctcactttaccaagtataaatatatacattataattatttatattcactttaacataatattttgttctaattttgatacacttaatttcattctaatgtgcattaccacatcattagtttagtgttagtgtgcatatttttaatcagtttttttcaaatactattttaatgcccattttattccttattttagaaaacatttaatcctgtatatgtatttttatagcaattaactttatttctgatcttccatttttttacaaccaaatctcccccttttcacataaattttttgaaattaatttttttaaactatgtattaataatatctatgtattataagtgtttgcaaattaaatatatttgcgcttaattggaatctaatctgaaacaagatgtatatggaatctcgggaacatttacgtctaaaaagagtacttttactccatcttttaatgtaaaacttttcaggaactcaaggatatagaaaacgaaaatgattcaacagttgaggcatacgtagtagataataacatcttcaagtggaaggggcatatactcggacctgtatgtgatcgttataaatatgaattatttagcctggaacaccttatgagggaggccattttactttggacatttctatccccgaagattacccttacagtccccctgtggtacatttcaccttatatataatacctcacccattaatcataataaaatataaattttagataaaattcgagactaaaatttggcaccctaacatatctagtgaaactggagctatctgtttagacattctaaagagtgaatggagtccagccttaacaattaggaccgctctaatatcaatccaggcactgctttcagcacctgaacctggtatgcaataaataattatataaactatgtttagacgaccctcaggacgcacaagttgctaatatgtacaaaagaaactataaagaattcgaaaatactgcaaagtaaatttaaatattgatattattctcaggctgtggaccagtacctttgcaagaagccgggacgaaagtagagaggggaaggttaggaatgattttattaagctgtttttagattaatttacttttggaaattggaattgatcgagaatcggctgtggtaagttaaaacatttcaaaagtaattcattcagagagctttggaagaaaacggatgggatacaacagtagcaattaatagacttatggatgcgtaatgagccaaagttgatttaaatttaactgtattaattttttatataaattattttttattctatgccattcaacatcgttcccacaatacccaaagattccatacaatatattatataaattaattttaataaatgggagattatttaaacgttggtagcataaatccaaatttggaaattcttgaaaaaaagaaatcgcagtcgaaatcggacattttaggaggcaatttaacaagtcgacaattatatttaacaggtactattttctttaaaaattataatattataggctatggaagacattggggagagaaattaacctattcagtgggcttagcctatggatctggtattttattcattcataataattaattttatcccaattaactattgataattctaggaatcctgtgcgggggttcattcgggttattaaagggaatttcaaagggaggagctacaactaaattatttgtaaactcaattctgaataattgcagtacctacggcccgaaattagggaatagattaggatgcctaactataatatattgtggaataaacagtcttgtaaaaacagtaagaggctcagacgagagtgataagtacagtgctcccatagctggacttctctcaggagcagtttataagctttcaggaccactcgcagcaactgcaaagtattcactgggcactgggcttgtattcacagctatagactacgcattaagaaactctttcatttaaatgtaattttataaatttaattatatttggtttaaaaggtcttctcttctcagcttagatgagaaaaactcataactcagtctcctcatttcctatttcatatattatggagttaaactaccttaacatacgaaggtgtggatattcgtttatgcctatgagcatcgtgcaggaactcgagcatatcattataactggcctcatttacaatcaattcagctaatctaaggatgtaactaagagttttcttacttttctgagtctggatccttgaactttacaacatgttcaatttccaagtcgccatcctcaagtgatgagaggacctgcttagagttggtgagattcctgaccaacacagcgacttcctcctgcaaactttcagcgttttcaagcgcatcagagttcaactcattctcaagcttaccctaaaaatatgttaaatcaattataagttgaatatacctcaacttcgtccatctttaaattcacgatgtttagctctaaaagagcgtcgacccagttgagaagtatcttcctgtgaagctcgtacttgttcaagttataattgtactgcttaatcacattttgtctgttctttttcagcaaggttaagatattctcgtgagcgtgttcaactaggatccggtccctgtctgaaagcttatgtttaccaaatggattttcaggcattggctggtttagaatttgatgaggggattgtggcaattgagcttttaaaatagtctctggagagtttgagaaggtgagaataggtgacattttgttaaaggcataatgcaagcagtcaacggcttgcacctaataacaatgtgttaatagaatataataccaatttgctagtgtggttccattcatccaagtacttcagagttacattcccacgaaggtcaacattagggtgatttttaactatttttatattatggcctcgaatccagaataaaggtgtactgaatggatagtcagagagaacctgaatcaccaaaggtgcgttgacggtaaatccagaaaatgtataagggacaagtccaacaatattgagcctatggccatcaaaagaggtacctaaatatgtgttagtaaatatgtgtcaagtaaaatatcgttacacatactcattgaacatttaaagttgtggtatttcaaaaacagcccatcaaggtcaatcatgagcatttcataattactgaaatgttttttcaattctgacttaaggttagaatccatggattataagcttaacaatcagaacgcatgagaagaggttaaaattaaaatacaagaaacattaaaacaaaataaagaatatgaaaactttaaaaataatttttaaaaactacgttttcaataaaaaattctttaaagtgtgtatgttacttagtttaaaatatatacaaatgaggctatacagtaaggaaataaacatacaaataatttatatagtaataattaaatttcatgaatttatattattttatttataaaatgaatatttaaatgtaatattatgttaaatttcttttctaacttttataacagtttcgtaaaatatttgaatcttatatatagaaatagacgacctcatttaaaggttggattagtcaactgtataatatttggaccagttgaattctataactatgataggaatgaacatgtatcaaaaacagacctttacttccaatctaactcactccacaaacccttccagaccaattcattgaaatatacaccaaatataatcgcatatactgagtcggataataaaggatgttgtagtgaatcagattctaaggtatgattcaacttatttaactcgttatacaggattatgttctaaccgatagggcatttgagaaggtacatttccataaaatttgcactcaaaaattaaaaatttagataaaatttgaaattgaaacttatgaagttgttttattcatgaaaggaactgctaggaaacctgcttgcgggttcagtaaacaggctctggatatcctaaaggtattccaaataacaatcactttaaattaattacaggcacttaaaatcgataccataaggactgtaaatgttctagaggacgaagatgttagaaatgggctaaaggcatactcaaaatacccttacataccacaactctatgttagagggaaatttgtagggggcctagaaaaaattacaaagatgttttctgatggaagtcttgaaaaacttctaagagatggttaaaattttatctctagttgatatattttaaaataatttccttaatttcaatttatatgtccacacatttgtccaacactttgaatatatttataaattttgataattaataatatacaaaaaagtccaagccaaaaagagcccaaattaaaccacaatctgtcacattctctgacaatagcctaatgatgtcgttttaatggggtttgtaaattgatgttgtgtgctagacagtaaatattatattagtttttagttgtatttgtaaaaattttattctacaggtaatacttgttatttattttaattatctcctcggctggttgaaatgtgtaagtgttttcagctcaaataccacactttgtctgtcattatacacacatgttttgtgttctaaattactgtatcacccctatttctcttcttatggcttttctaaatattattttgaagccaaatttcattagactttcaaatgtgtgaatatttaagctcaaaacagcaatacacattctactacacaaattccagcctaatgacctatattttttacacatcaaactatttatcttactagcattaaataatagtattttagatatagaaaatgaagattttaaattttctttcgattttatgtttttttactctaaattgcctgtgccgcatggatgacaagtccggcggcttgttaggcaaaatgtatcaaaaagtgccaaaatttttggaatcaaccagagtacgtaaaacattcatgtaatgttctttagagaagaggttatgataggaataaaggtgcctctgtgagagccaggagatccaggctgaacgaggacgactcatcaatggatgaaatgcactcgaaaaaatacggaaacgatttcaaaaactatcaatttatgagcacaatgaacaattttagagacaaacaaggtgagcctttaaccttagataaattttcttcagactttaataattttttccagactaatcatcgcacatacgctagctacatcaagcgcaacgaaggtgacggtacttgccctttagcacacggagcacctggccaagttggtcaatcctgtaaatttgcttatccaaatggaacaaattcttcaaacgggttcgacggttctgaagcctcgtgtccatttaaacaagattctcaaacttcagcctctgtagtcacacctgcagctgctcatgcatgggatgctgataaaaatcccgaacatgctactgcagaccagacaaaagcgcatgacgaactaaaatctgagctcgaagacgtcaaaaaccaacagaaggagttggaagagaaagtaaaccagactagtgcaactgagaaagctctccaagatacggctgaggagcttaaggaggaccaagatgcactaaaacaagagcaagaaaatcttgaggaagctcaggacaaattagactccacacagaaggaagttgaggctaaagagcacaatttagagaaagctgagaactctttaaaaaatgaagaaaataaattagaggaggagaaagaaactgttgaggaccagaaagaagagttagaaaatgaagaaaaagaattaaatcaacaaaagaaggatcttgactctgaaaaaagtgatttagataaggcaaaagatgatttaactactgatcaaaagaatcttgatactcaaaaggaagaactagataatcagaaaaaggacctggatcagcaacagaaagatcttgatgaccaacaaaacaagttagaagaagaacaaaaggctcaaaatgaggcctcaacttatgccaatgaggccggttccaagttagataaacctactgaaaataacaatgcacaggcaaatggtctaaacaacttacagccggtcgcgtctcccttggtgaacgggagtccggagggtgtggtatcttctaaggcgcttgtcgataatagttcagtgccttcttgcgacactccaaccgatgaagtcgataaagcttacgaggtattctttgtacattatctacccactcagttaatatagtcacattataaaaattttaatcattttatagtctcaaggtgaagtgcaaaatactactgctgatactaataatacatctactccctctacttctgaagaagctcctactgaagacaatgagtctgaagctgaaaatagcgaagaatcagaatctaccgaatcaacggccacagaatctaaagaggagtctgaacctcaaacagttactaaatcggaggaagctaaagaaaatagcgaatccgaagatcaagaaaattcactaaaaaatgagtcagaggattctggctctacggaggatcaagatgaaggcggtgaagctgaatatgaggaagaccgtgaagaggaggaaggtgaatctaaaaccacccaaaagaaagaaaaaaccgatgaaaatgctgaaactgacaaaaaacccgagggggaacaggttaaagatgaagtataatagtatcgctaaaaaattattttatgttgtctttgctgaatgtaagctcgtttaactgtgtcaacagtttctataatttattatcatttttatttttattacttacattgtacatttcctcgaggtgggagtatctctgcctttcaatttccacttccacttccaaattaaaattctcttcacttcctggcccttccaactgcttctttagtaattcaacattattcctcaacctctaaatatttaatgtgaatattatatattatacctcgttttccatgcgtgcaagattcaatgagtttaatataacatgcagttgacacttcaatgcgtgtattttttgtttcgcaaactccagctccccagaatacaacgttttcaacaacatgtgtggcttatccaacatcttttcatccactactagatttgcaatactcttgctagtaactgaatctccaattgttctaccaggactatctataaaccctataaatgattattttatatttaaattaattaacttgaaagctgtccgaagatgtgtgggtgtatatacaacttgaacatgatgaggaacttgaatacttgaggaggtagcgaaaagttgtaatagttattaaaattccaataaaagagctccaaaaagtccgttactgccgtttttaacaaattattcagaaaacaatttacaacttgatcaaaatctagtcccaaggtatcaactgggttaatattatctgcctttaatgccacttcagatgccttaaactccacagattgatacaatcttttcatatgttcacacattaaacccaagtttttcaccttctcgtctggtattattcccatcatgatcaaataaagcagtattactgatgcgattcctttcaccatttccaaacttcctcctgatagattcaactcaatcaaatctaaacattaatagtttatataaaaatattaccaaataaaaacgtgtactcaaaagttttcagcagagttgtgtaatctactgaaaacacagcatacaatgaaaattttaatgcatccatcagtatcggctgtgggtttactctctgttgggtctaaaattatcaaaattaaagtttttaataataccttcaggattccaacaatttgtgaagctaaactcaatagaaacttgatattataatcactcagaaactgtgcctaaacagatgttatagaaaattaataattattaccactggagcatcactcaggggatctgttgacagcagtatgagtgtgtagttgaggaaaaactttttataaaatattatttttccttcttcaaactcttgattcagtgctaagctaaactcattacatgaatttgaaatatatgcgtttaaactctctccaagtactgaaaaggagccaaaaagtcccattttcattgtcattttaaacacctaattattcattaaggttgaataaaatttaaatataaatcagtttttcagctaaaacttacatttttaatcaaattatcaccaattcttgcgttgatatacggatcaaaaagcgttattgccagttggaaaagtgggaaagttccaaaatccaacagagtatccatttttatcttcacaacttcttcatttgttgttgtttccttagtgtgtgccacatttagcatatacttgtacacttcatgcaagttattcactgtttgtgatgttatccactcaaccacactattagcacttacatttccaaagtagtccattaaacaaagtgaaactgacaaataattagaaatggaattaaaaatttgatattctacaaatgttcccgactttgacaagttcagcagaatcacaaaactacacaccaacatgttaaacaactccaaatcgaagttatctctaaagtcaccaaaatcactatagcagtcaagaacactcaatttcgatattaactgtaaacaaaaagggccatctacatgggtaaaattccttagagccacttgagatactaaaacactttcaagaaccacgctaaaaatctgtaaaaatagtcctgaaagttccatcttatttgaagactggtatgtacacttgtaatatgtgtacaatagtgttaatggtttagcgtaatctaatagaatttttctatattttactgaggtttgccactttgaggcaactacatatttatgtattaacaaaatagattctatggtacatggtgggaatgtcatgagtatctttaaatcttcttctctgattaatgataggaaactaagtggattttgaactttgtatgaaacagtattcaaagtattatttaaaagataaaactggtcctgactacactctgatagtgtatcaaaaattgaatcgaaaattccacgtttgtgtaacaaatccatgaaagagtcaatttgtgacactatctgtagcatcaaccctaaaaccctagtcctaatgtaaacttcattaaattgatcaagaactttgggtaaaatccttaaaatttccttgttagttttcaaatcttcttccagtacaatcttaactctaaaattacacctttcgttacttagaaagcatgaacagtagtcaccctcaactgaaaggtcaggattcatctttggctttgtgcagtcgtaacaacaatcattataatacaaataatagttacaggggtcgtagtatctgttccaaaaatataatatattttgatcattctcagataagtgccaattaaggtcattatatccaaacagtttctgaaaaattaataagaacccatataaaatatttttataggaatcatcttcttgttcacttattaaacttatatagtctattattagtcttgagttgtttgaagaatccaaaatagagtctagatataacaaatactggtccaaatcaaccctctcctcttcattgatatttatgaaccagaatgagcctaccaagccatattcgtctatattttctaatggatatctctccttcaagagaatatcatactttctcctttcaattctacaatcatcatactctttactaaggttattaaagaagatgtgcagagggtattgcaagacttcatttagcaaatttagggaaaatgccaccaaattcaccagtgaaccatgtatagagtttacatcttgtgtgatttttctcagtttttcattatctgatctcaaaaataccactacttctaccaatttagatatctcaaataacactgaaaatgtttggctttccaccaactttcttgacgctttactagaatctttaagtacattactcagcgtattaagaaagaaggacacaaactcaatgctttccaagtataaatttattgaaaatttctttagtagacaattttctcctagagcacattccgcctctaaactcttccctgggtcagatacctgggttctattcagatcattcttttcctggtatccttgccttaatctatttaaaaatttacttttattactctgttctcctaattctttggattccaacccgtttgttttaactacttctacacccccaatgattccagccttaacttcctcaaacaaacaacataatcccctttcttcatcatttttatatttaaatggacataattgaaataattgtggcaggtgtattttatttaattccaggatcgagtttgtgatttggattccttcgttgagtatcgagaacgattcctgcacatttttgtttatttttcttataaagtccatctgcggtgaacgacataattaactactgattctactgtacattttagactatatatactgaatcacgcccaactacattaaatcgtgaatattgatattatattatgcgtttagtgacttctttttatttacatttattcctgtttcctctcctgagtaatctaatgcttcagttcgatttctatttgtcattgcgttgaacactttcatcttcttttcgaactttttgcgatttgttactcttgcgtttccttgtgtttttgttctcttgacaaccagtcctctgttcttcattatatcctttccgatttctaaaaattgattttatattaattaaattacctctctttccatccactacttctggtggtttataaactttaacattcttttcttggtattttttcctcctttcctctttaagcttattatatttactctttattttatctacttcatctggttttctaactctttcttgttccttatcaactttctttgagggccaatctcctacttgggagtcttttttggccttctttttagcggtaccagtgtataagtaatctgggttatttctcttttctgacatgattacactttgtcttaacttctgagctactaagttcaagtcatttgagttagttttcttctcagagcctccaaacccaggaccaaagttcgttaaatcttgcaaattacttcccaccaaattcctctggtttttatccatcatcttcaggtctaaacaattattagcgctaagtttaaattttataagttacattttttatattttttgctcattggtattcttctcatatggtccatctcatagtcttcaatttctttcatttttttcataaacttgtactgatcgtcttcaacttcctccttttcctaaaatttattagaaacaatcaacttacttcattcgtagtgtattggtttattaaatgcttaggagccttgtacttctgtcccttcacattgtcaacttcaatattttcaggtttaggaaccaaactctcatcatcttcctctttagctacaaatcaataaaaatagtatatcaataccttttaggttattcaatagtttagaaatttggtactgtaatttattctctattggcttcgctttatccagcagaagccttatttccaacaggcggtctatcactggatgcttttcaacagacactccatgtacttttaggagtaaataatatgttagatatgacaagtacatcaaaaacaactcatttctgatatccaaatactccatcccctatattccattaattaatgtgttaacttacatcttttgtgcaaaatttaaacgatttggggtcatccaaaatcttaagtatctgttccttggatatatctgatttatccttgaattctttcagtagtaataaaaactctgggtgttccttatccagaaactccttcttttcttcatcactcatggttaaaaagttttcgggaagttcaatcttttctgaatccttcttcaatgattcagataaattctccatcagcgtatccagagcctataccgtttatttaaaaactggacttactgttgaatcatcttccttttctgactctatgtatctgtccaattctgcatcctcttcctccacatcttcatacatttcttccgcaatttcacgtgcttctgctatgcgatcttccaatgcttcctcatccgactcctcatcagagccttcaacgtaatattccttcaacttcttcccccaatttactctatcctccttttcttcctcctcatcctcatcaccttcttgggggtattcatcatctaactcgtcatctaattcatctaaaaacatcttactcatgaattacataccatctgtaacttctggagtgaatgaccgaggcaaacctaatttctcataatcctcatcttgagaattttctataaattaaattaattatggagaataaattattattttaaaattaacaacattacaaaccttcatcttcgttaaatggaatataatccttcccatcatcagtaatcaaggccttgaacccagaacttgaagatttctttttgctacttttattatctacatcttctgatgtttttttaggctttctaaagatgtttttacccattttattataaaaatattttacagccggtaaatcaataaaaataaattattgtacattaaaattatttaaaataactcattttataagcgtgtaaattgtatccaaattgaaatgaaataaatattcaataatatattatatagaatcatgatagtgaatgtattcacccccttaacaatttattttaaataaaacaattctctcaatcgatggaaaaaaataatattttaaaacaaacaaataaaattaacatggattctactatacatgactaatttttgctgttattaattcaaatctcaacgtcatcttatatagctctttaataattctgattttcaatgaattaccttccccttttatatcaaatattttttccaatatttttacctcttattttttataattatttgaattatttcatcattgtgtttacacctgtgcacttcctagccctttctcatatgaacttgcaaatctatattcttggttgccaattttcattttaacttttattttatactaagttacggagttaattttcttaaattaatttatggcttaattttaaccaaaatttgtagaatttcccggtattatcaatagaattacatagaactcaccattcctttgtctaataatcttgatttaacaagaaattatcaaattttatttaaaaaattttctatgaatttatgtgtcgatttttgttccattaattatgactttcaaacagcgaatagcctagaataatgagtaactgtgaagtggagtcaagaactcactcactggactcatgtgtcagtcctaataaccaactaattccagaatcggacttctgttacgcagaaggagatagtttagagggcggaccatgtggagagtggcttatgtttcaagtacatttgagaaacaaatgctggcctggaacaattcgtctacatcttgaatcttgcgatgagtattgtttcaggacaacagtccatgtgggaagttttgcagacgaaagggacaagtgcagggcaatttcatcctgcgtaaacgatagattaatgaacaacctctacgcagaatcaatttacaagaacttcgagtgggacgtatgcgtttcggacgacaatacatataacgttagatacaaagtgtctatgaaggggatgtttctgctttacgtgaaacttgatggtaacgatatcgcagggtctccgtttaacatttttatttcagacggtaaaacatgttcactgtcaactagagtccaaaacattaataacttaaaatgcagagcaatgccagatataaagagcatggtggaagttatggatgacgaaaggtgggattttgagtgtaaaaacaaggttccagaagactaccagaagagaaggctttctactgttgacaaattgagaaaatactcactcgtaaatgagataactttgaatgtttgcgataaggttgggaacataattaagtacaagacgccctacgtgaaagcttggtgtacaaatttggggaaggtaattgacgttaaacacctgggtaacggggttatctcaataaagtacgtggtaatagtgccgagaccagacctagataaggtaaaaacgttttactcaaataagaatgaaactgttctcccgtcatatttacgtaatctgggaactccatgctgcttaaatgttcaactagatggagaatctatatacgggagtccttttgtacctgaaataacaaacgtaatggaattggaggagtactatgctagtttcccagaaacactggactccctttcattgagcttaaatcacatgttaagtcaggataatttggaaggatgttcccaggcaatatttaatttcttccacgtcaacaaggatatggatgacagcgagaaatcaaaggcgtttgaactaatatcaaaactgcttgatgataaatctaagcatctgaaaaagaacaactttctaatggagagtcaaatgtataaaatgaaccacttaaagaattatgggctaggtcaactacaccaatttgtggacagccaataccagaagatgctgaaagctaaaactagtagcattatagagtgcattaaggagcttaatagctataactcatctgttaatggtgagactaaggggttcaagaatttggcagacgttattttcaactacactcgcataggagatgagttaagaaagctacacagatatgatcttgctgacaaatttgactccataagtgatagaatatgtgaagagatagagcttaacaggtgggagaaccttctccatgataaaaagaagaaaatgctaaagattaaggagcaagttgatgaatcagttaagaagcttgaggattttaagaagaaagttcatgaaaagtacgataacctggaattcaaaccaattaaaaagatgcaactagacaaagggacccagactattcagcaggaaacagtaactggaaggctcttgccatttgttaagaataggtgtattcctgaagaaccgaagactgaggtggataagatagttgaaactttctggaggaggtgtagtaactatgatattcactcgggtataacaaaggtactaaagtcaagtataagactcaaaaacgctctaaacgagatattcttccactacagcaacaaatataacactaaagataacatgatccagtatggaataccgaggaattctatggacctcttccacatggacttgtcaatcagcaaaactttattgaataacagggaaaagttggacgaaatgttcgataagttttcgataatgatctcggggaaaagagtacttccagaaaacatgtggtgtgtttaccttagagaattggcttatatgaacctgttgtacaagatagcagaatcaggagacgtgattctgttaagagataatctacacccatcaagactttccgctttccaccacttttgccaattccacatcttaactctatatgaaaagttgtttactacaagacctgaattccaaaaatcgctaaagttctacaatactaaaaagctattaagatcaagtctcaatttcaagtatgcaaaagagtctgcacaaatgcactacttcccaactgaaactgacttggcaaactacataactacagagattccaaacactgttggcaacaagttaaatgagaatatattacatctaattttcaaacattatagcagactctcgatgtttgggaagcagaaacaggacccaaaatcttacaaccccgatgacgactcatggctttccactgcaatgtttgtagttttctcaagagatttcggaattgttcccgggtatatggatggctcatcagttcagaaaatcgcagatgatacgattatagcaaatattgagcaaaacacgtatcagtctaccacctttagaggaagactattttataaagactttgtggatgcactggtgaacatcatatctaactcaatttataaaatatgcctaaacaggcatgaaatgtacactaaacacctaaaagataactcaatcctgaatatcactaagaagaataaattccatgaaacaaggaactgtatccaaactcaagaatcagtattggaagaggttgacgaggttctacagattctaggattaaacaatcctctacacattgaattaacaattgaggcaatatatggttctgaggccttggaatatttacactaggttgacaattaatattgtgccaattttatttcagtatttatttacacaatgagtcatctcatctttaatatagatataaacattttaaaatatgtaaaaacaataaaaatttcatttatcgcaaacgattttttaagaaggctgggatttggagagattccaactgtagccacaagtgcctgtatatctagccaggttctagaatatttcacgtaattattatattttagattccactgaaccctattgtatctgaaaattccgtaattggggcttttcttgacagcctcaacacactcttctggaagggaaaacattttaagggtattttttaaattaattttcaacttttaaaggaaaatttataccaagtaaatggaaatggtaccacagacatggatactgggcaacaaggaagaagaaattaaagtttgatacatatagaaggcataggtattgtagctttttaataaattaaattagataccatgaggtcagaggaccaggtccaagaccaccaagtaaatgggaagatcagtctttctttaaacctttaaggcaatcggttaaattttggtaattcatattgatgatagtagctccttttcatttgctcctgccttaagttttgcgatatcgtaatcaggtctctgaatcctgctaggccttggaagtataactaaaaactatgaaatttaaaaaattaccattaattcttccgaatcctccactactcatgtctggtatatttgaggcaactggtaaatttgttaattttgtcattacagaccccgcaagagccttagtcctaagatttattaatatttaaataaacaaactcgtcccctacagcctctctcattaacgttaaatacattattatagtcgatccaagagtttttattattccaacgttttgagagtcagaggccagggtattcagtgcaatgagcgcttcctttgccatcctaaaattgttaaaatggttagaatattttaagcaaaccttcctcctgctaatacgcgaaagtttaatgacattatttgtctccctgagaatgttaatgaggaacaaactcacccatttgtgcgattttatttatgttttcaatacctatgaaaacattattaggatgaaaacgtactatttttcagacatatagccttctcagtctcactagagaaaactgaacaatatgcattttggaatgcctgagtggaaattagagacattaaacctgaataacactgtctgagagtttaaaatacccatgtgagccaagctagataaactatcaattacgaaaccctttgtactacttaaacttggaggtaatgtgttgaaccattctggaataaagtaaaaatcaaaattataattttgcatttggtcaaagtttagtatattgtaatcttgattagttttcatcaaatcgtttatccggtccaaattactctcagattctgcgatattttgagaattctcggtattaaattcatcgattacagctgaatgttcgtttattatctttggtttatgtcttctcatcagtttcttagaattacgtaagaatacgtgacgaggtaatccaatgggtcctaaaaacgattaaaattcttacaattcagtaataatattagtaaaaacggtgttgtcaaatttctagacaaatgtgtaagtaaattgtgtcatttcagtaccatctcggtggttaatattactatttcttcctgaaactatgataatttttaataaattgatcagaaagagaattaaaattttcattagttatttttataattaaaatatacaattttgaattcatttgtacagagaaattggttctattttggaatagtttacacaccacacaatgaaggctgacgttgtattaatctcttaaatagttcataaaatatcttttaaactgtattatataattatgttaaattctaatgtatctgagtcggaaaattacagtagttttgttactgtacattacgcattttgtacactctaaaacttctggatatgactcaagtgactcaaacctgatcgttggaagcatcgggtttaaaagactatcgcaaataactgagctctgtgaagtcaacaacgactttctgttcagaacaaatgaagtccaactcaggatgaaccaggacatcttcgagtgcctctcaaagatgaagcttaatggaactctaaaaacaacaaccatgacatctctttcagttaagcaatggtattccgctccttattaataagttaaattcagggttctctgggaagttgatcggtttaacttgaaagatgaaatgaattggatatcgggggtatttatctcgtcaaaataagattttttagactattaacacttgcgggaactctaaggattcatttctcggtggaccttggtgtgtttatattatttaactattttagtgttcttgcgtctggtggagttaagcggttctacaaccatcttcctgaacataccgagattaagataagtggtcgggtacattttttcgatgagtggaaaggtattttactttatttttctaaaaaaacaaaatattcaattccaaccattaattaaattttaggggaatctgtatttttaagagttaatgataaaatactatggagcggtattaaaaatttttcaataattaaatttagaatggcataactggtgtcctacagttcctgattctgcttgtatgaagtttggaatagatgcttgcggtatcgaataccctgataggctatctgtaagttccacttaagataattttaattaatggaaattataattaataagacattaggtgtatttcgaggtttcaacggctaattctgatcgctcagtggcattagagttttttagtaatctggccaaagaaaggaacccttgcgatgtttcttggggcatagacgatattgttctacattttagataggtttatcaggtctatcggcctcagaccttcataattcctaatgtggttttattttaaaattcgatttacctttgttctagatcaccacctctagctagtagaagctgaacaacatcttcttgttctgactcaagtgccacatggagtggagtatctccactatcatcaaccacgtttacatttgctccttagaaaaaatgaacgcaaagctttaaaaatcttaccattatccaggagcaacattacgatatcgagatgcccactaaagtcttttaataatgttaaacgtaccgatcagcggcaagatgaagtgccgttaagccctctgggcttcttacatccaccaatttcggctgttctatacatttttatcatgttaataacaaactttcgatcatatttcgaactttatcaaaatctccctcgacaactgacgtaaataaatcatcaaattcaaaggttctaaatcatgagtttattattttagaaattactcctcaattgaatccattatcataattctactgaacactccggcattctgaaatttatattattatttggacaaaccgtttcaaaatcagctgaatctttaaatgttgccagcacctgttcggaatatctaatgtattctatcgcggcatcctttgaggacattcccttaagtttcttccacgactccctataaattttatatatagactgaattttgaagtatagtaaattttagaaactaggtacagtttattggatgaattggctgaaaagcaagtccaataatcttcataatccccaaaccttgcctgtttgtataatcctaaacacataatgttataaaaagcatcagagttagtttattctttatgacaacacttaccgtatagagtgtaaaactgttcatcacttaactggccctgagacctggcgatagacactattttacacgaatttttaaatcttctgactagaacgaatccaaactttaatatcaacactgaggattcgtacaaatttaagaagtatgacttcaaagagttgaagtccaccattgggttgaattacaggggaaaggtggtacaaacacagcgcgcttccatgaattaagatgcaagaatattttattaatatttattaacaaaatttataagtgtgaattgggaaattatgaacagatttagacttcttcaggtgattctacattttgaggaagtttcatgagtgaaaccgccaattcctctattttatacctttttgactataaaattattaattaaatttaaaatataaaacgtactaagaccgagtggtaataagagtgtttatatccgcacaagatggacaataatgcggcagcgttgaagtagtatcccatgatcatatttctaagtattattttcaatgtgaaatattagtgaaacttacaatgtgcctatatctgagtttgggtttcctaattttgaaacacttaggtccaaattacaagtatatgttaggatatcagccatctcttcatgcataaatgctacacagtatagtggtcccgagatcacctttgcaataattttattaaaaattaactcaccttatccacataatgaatcctaagcataagatatatcttagcctgctcaaaattctccttttccttataaatgtcatacagcagggtctgtaattgatacagagcccagtgctggctgaacacattttttgcgtgatcgtagacttgtagtatgtccataagattacttttttctattccatcaattctataaacatacgctctctccaattctatgtattcgtttgtttcggactccgtaaatttatacccacacatttcacactgtgtgctaacaaattttgagaaaaatgaatcgtagtttaaaaaaatcgatccgtagtggcataatttacacaagaatcctctgcagttgtcaattggtatagaacacctatcacatgtacaaaaaaagtgccaattttgaagcatggtccttctccctaagtgaaggttaaaataactactagagtactatatgtaggggacaaaaggtcattttcgcccaaatatgatatcgttatttcgtctccaggtactagtttcttcctggctcttaaaacaaactcgtcattttcggtgtgatgccaacaacacgatgggtcgcagctgtgggcgaggtaggagatttctattaaaaaattaaacttaattaaactaactgtcatatattacaagcccatctggttctgaagtccttccaaaggcgttgagtggccatacttgtaggtacagttggtacacttcaggtttaattacaactccatcatagacgaactctccatcttttaatgtacatattgaatttaaaactcttaatacatctagagttacctcctggtttcggtctaattcatgatgaatttaccatatataagcctactttcaacccacttattcgccataatatgatttgactcttcattcccttccagaatactgtataaagcagccttgtgccacaaagggggtatcacaaatggagattcttcgttcagttcatttagttggaaccaaaggtcttgatttgataatgggccaaccataaaaagtggcgattctgcgaatattagtgttccaggttcaaaattcttccgaacaaataaacatcctaagcgaactcatacgaattatcaaacttacttcctttgcccggcacttcagagactctaaccaaagaatctatattctccttagagaaacattctatttcactttgatatttgggcgtttcgtctccacttaagggagaatagccgtcatcttcgcttactttctcggaagagctacaatgtgtaggcgtttcctcgctgcgatcatcatacattttactttatacataatattaaattatgcctgagatattttacagagattaagtggaaatataatataatggatctggaacgggtcaggttaatgttagaaacacataagaacaatattgtgccaaatgtatttactaaatttgaaaattatgaaaatatacatataattaaatcatatatcaattaaagttcataatataaatttaaattactttttaatactatgcgatataaccaaaatagaatagaacataataaacgagatagtagggaataaatataaaaataatcaaagaatttcaaaattacagttataattaattagaatcttgcataaatatggaaggaaatcataaaactattaacatgttaagagcaattataaatatatggataacttcacgaagaacttattataatttaatatctaaatatttatttaatttaaaacactgataaaatccatattacagggtgtgaatattaatatataatgtttaaaaaaccttttccccatgattcatttattagtatggaattttacagaaaaatattttaatttcaacgaattacttttatgtattattattatgtaaattatttttatattagaccataaattcagttctttcccttgaattagaaatataattttatatttcgatctcacaaatcatttgcacttaatttacaaattttctggtatttaatcagaaatgactagaacttatttattgtttgagacagccgcaggctacggcttatatcaaatcgaccaatgggaccagattggcagtgatttatcgctggacgaattagtttcaaactctgaacgattctcaggaactgtaaagttcaaagcatttcagccttttagaacagcaaaagaagctcttgaaaacatgagaagtattacagaaggagaacccactttactgcttaccaacttcctaagtcagaatcttccacagtcagatcacgttttggcaatcgttgacgtttctctagcaaaaagtttatcgcataaaggctttaaggtcatttacgattcaaatgttcttgagcttgttagaggatgcagattgtatgaaaccaagagattgaccaaattggcttccggaggaacttcttttgatatgaataacttccaagtaggtttaggacatagctatagcagaagcaagcttaaattcgacccatcaaaacaagataaacctatcataaactcagtttctctcttggatactctaacaaagaacctgaactcctttgccatgagagtccgagagtggtatggatggcattttcccgagttatgtaaattagttcctgataataaaacattttgcgaagctgtaaagctaattaagagaaaggaagagtttgattttgataatttggagcctttgaatgaacttttgggagaagagttggccttgacagttaaaaaggcatccaggcactcaataggtcatgagctagccgaccttgatttgaagaatattttaaattttgccgataatgttataaaattggatgaaatgaggaccaaattgagtggttacttgaacgacaaagtttcaatggttgccccaaatttgaactgtgtggtaggtactctactttcaggaagacttattagtcacgctgggtccctggttaacttagctaaatcccctgcaagcacaattcagatcttaggtgcagaaaaggcacttttcagagcactaaaatctaggactaatacccccaagtacggtctcctatttcagtcaacatttatcggtaaggcctcaaataaactcaagggtaaggctgccagatatctggcaaacaaatgcgcccttgcagctagacttgactatttttgtgacgtcaacactgatgtttacgggaagaagatgagcgagcagttgaccaagagaatggactacttactaggaggaccacaacatgataaaaacatcaacgttatgaaacaggcacacgaggagtataaacaactatcaaacttggcaaagttgaatgaaaaggttaaaaggactccagaagatcaaactgaggagaagccgaagaaaaaaagaaaaactccagccaagaaaaacaaggaacagaatgaaactgagcctgtaaataatgttgaaaatgaacagaaaactgtggataaagattcagagtctggtgaaaaattaaatcacgtgtcagaatcggagaaagtgccaaccgtcgatggagagccagcgaagaagcccaagaaagcccctaaaaagaaaaaggaacaacctgaagatagtgaaaaatcttcaaaattggttgatggagtttccgctcccgaatcaaacccaaagaagagttctaagaaaaagaaggaacaacaagaatctcagagtgcagcttaatgtaaattttaatttagctcatattttttatacacactaacacattcttttatatatttattttttgttattttttgtatattatagattataataattaatataacaaatttataaatttgatatggaagataactcatactttgaggagctgtgtacccaggtttacaattactacggaaaggctaggaatgtggacccgaataaacatgctttagtcatgctaaggtcaatgggagaattctggactgaagatgaggtgaaaaacgcccttttaaacctaaatgaccggcaggagtttttaagctttacaaatttcaggcgcttagccaaatctaagtggtatgaccctaacaataatgagaatgaggtaataatatttatttaaatatggaaaataggaaggggaacaagtaaacgatgatggatatgggaaccaaatacatatgctctcagaagatatccaaaaattcaaaaacgccttcaatagggtgtcaaaattctacacaggaaatgaaggtgagaacaaaacactccctgtaaatgttctttataacattctcactaattttgacaaccctatgcccaagagggttggaacttatcttgtttctagcctcaatgtgtacaataacgaggtttcagcaaggtcactgctatgcttaattgcaaaaagggaagagttcggcaaggttctgtgacctccaaacttgttaaaatttaattcaattgacttattccattaaaatttatattgcaaatttaaatttcaaatttcaaatatactacattaaactagattacacgggtgttagttcattatgtgcgtcgtatggtatccaatggagtttttccatgtacaatttcctggttttggttctcgatttagagagtaattctctcttcttttcaggaagtatggttattaccgagtttccattcgagagtgtgtgcagtattccaagctcttccagacaagaaatgatatcatttggctcaaaagcagtcatttgagaaagatcctgcaataaatttttttaaaagtgtgggcatagtgtaaattataataaattatcatactactgataaaaacaataaataaaaacataaatatttatatacctgtattgtcaaattttcgtgttttgggtcaaagagtatttccagtaaaacttcagaccaatatgacatataggaagcctttccaaggtccgacagtggtctttcaggtgtaccagttttcccttcctttttcgaaagaaggtaactaaacgcagttagatactttccgtatccctttctctggtgctaaaaacgtattactttagaaatcaatacctgtggaagtgataatatacaagaaacgttgtttttagagtgtttttcctttgaaaaataacctgtgatatggtatccgttctcgtcaaactctgtcatgacgtagaaaataaacaaaaagacagtatgcctacattatgttaactaattgaaaacttccaaaccttaagctcttatggtccaggaataactttgacaggaaacataaattttcacagtacactgtactcatggctccgtcaacttcaaacattgcaaggttgtcatccctgaaattgatttttatcaactttcaaattattagaaaattagtggattgaatggcctattgtaacaaacctgtaaatttcatttcctggaggatgtcttagttcacagtgaataatatgaaagtttaactcctcttcgtatctgaagaacgagaggcagaattcacaaatatagagagtgtcgatattttgatatggaggtgggtatggagagaagtaccaagtatcaacaaggaaaggccctagtttaattcttctaatagtttttaatttagtgttaatttcatgctccctcaggtattcatcgtcaattcctattcagttagataattatattgttgttcgtcaacttatacctgtatggtcgtgatggaactcaggctcaatatcgtggattacttgggctcctttgggaggcccctgttccatagttcttatattttctatagtcaaccagcagtcaagtctacgatctaggcctagccagtgtatgtagtagtcatactcatttggttttaaaaatgcgatttccttatttgggtccacaggcctatgcatttgtgagggagctaaagcctaccttgcatggactactgtacatcttctccacaagttatgcatcaaatccttcccccaaagctcgtattccataggatatgcagttgggaactaaaatatttgattttatttgaagaaatttaggtatttatgtgggacttccaaagtacctgctgtgagaagatttccctcgcttttgagagtatggcacttttttcccgggccttttgaattgccagggtctgcgattcactgttagatttatttaacgagggctgtttgtttttatctacagcgtcctccttgtattggacctgcttcgtcaccattgcgatattttatggatctccctgctattttttaggagtttaatatgaatttaaatatttataatatataatatttgaaataagattagatccgtctcttcttagctagttttcttgtgcttctgcactacttgccaacaaactaagcagtgatttagattcgagttgctgtatgttgtgatattttacggttttgaggcccttatatatggttttcgcctgaattaaggtgtgtgaaaattttagtcgatcttacgtcgcttttacttgctatgcacgacattatcttcggcggtcctgaaaattccagaaatgccgcgaaatattttttgaatgcttctcttatcctttccactcctagttcctggatctaatcgcattaatttcttaatgtacctggactactgaatacttgttaaagtcgacatcggtttgtctgagggcgcttgtgtatgtttcttgactataatctgccagactctcctcattgctaattttttatcaatattcaaaccaataatttaagggtaaataaatcaataattatgggttaaataagtataattaatacaaaaatttgctaaatattatctattcgtacctcaatattctgtatattaggcttgattttgcagctgacaactccttttctaaatccgattccgggtctaaatacttgagcaggcattctctggtaaccttcagtgcctaaacaattgatttattcaaagagtatgtgaaaaataaatagactccgctgaaactaaataacctaaatttactagagccaccataactaaatcagttgcttctgttatgaacatctgtatttctccttgcgacggcgagtatgaaaacctatgatgataggcatatcctcctcctctaattgctctatacactgaccctaaaaatcattttagataagttttgtgaatctaggatttattaaactacatatatagagtaaaaataactaccaacaatcttataccttctgtaattgtcaagtattcacatatagttagtactggaaaataatcttcatggttgtatccgtatggagctggcacaaccacggacaaatatgaaacatctgttgatgccagcgacgataaaatccctgtttcattcttcaattttttatcttttccaaatttaagcccgaaatatttgttcaataccagtttttctccactttctttcagtggaaattcatggttatattcatgattcacctcatttttaatattagattcactaaaatttacccaaaagtccaaccaattcctcttcaatttactcaagtctgcagtaatgtgcaccgaaatgttctcaatgttgaatattttctgatgtaaactcttcaattccttttccagtctaacgggtccgtctgggtcagacattaaattcttaaacatttgatcctgctgacccaaactacacagatgtctcacactgccatcatcaaccctataaaattattactttgttaccaaaaatacataaataagtaaaatagtaaattgtaaaaattactttagataatttgacagttgctttaacattgtttttgctgaacgtttcttctttgaaaatgagttaagcaacgactgtacatggttggttataatatctctagtgtactctacattatagaaaatattatacataatttcaagcaacttatcataattttctgttgggcatgtaaagtgtaatgttacaagttctgagtatgggtctggcagtactgaggaactgctcaaacccaagttacagccatatgaagttgtgttttccatcagagttttaattaactcttctgacttcattagacgatctccgaacatcacatctgattcaaacaataggacacatagtaggaacataagtttcttctcctttgcgctaaggtttagtttacacgttgaaaatatcaagtatatacgtacgaaatcacttggaatgttattgacttggattgggaattttattctctttagttgatctttataactatccaattccttctttctcttcatcttgtcctcatcaaaatcatgttttaactcatcaataaccttattattataattatcaacattagtaacactgttattttgaggtttgaaatcaaaatttctatataatggataggttgggagtttaattagtcttgaatcacattgcttgtactggtctaatatatcaactggtggcccattattattcttcttcaaatcctcatctaccatttccttattcttcttaagttgttctttaccatatttcttcagttgggttctcatcaattccttctcttccttttctatcacttttgatctttccaaactgggcatgcacttaactgacactgacggtggttctataaaatactttagtagtaattctttccagtatttttcatccttttctaacaaattttttacaagatcatggtccactatgattttctccagctgttctcttttacttccgtatattatataccctattacattttctatcagcgtttcatgtgcgattgtttcaatttgtctcaaataattgtgatagcaccttttaatcagcatcctcatcctttccatatcaaattcttccttatatatattttccaataatgattttaccttatttccaaggacttcaatcttatcctcggtaggatttttagaatttttacttaatggcacatccttaaccgtaagctgaaaatacgtttccttaaaaagttccattgaaaaatctacacaactaccatatgggttatctgtgtgaattaatgctttttccagaggtgaggctgttgaatccactaggtatgatcccatcactgatatggctcgaatcaactcaaagtcctcccaactaggccctctccaagacattgtaaatgttccacattcctcttcttcacatgggaaatatattgtactaactgtgctcttttctaacttctgtacatgcttttcatcattccaaaccacaaatctattttcaaagaaatcttttaaatcatcatcagttttaaactttttactcaatctttctacattatcaaccatatcaatagttgttttattttcgtcagtagtttgattaattagtttttgttgttcatttaaaagggataaaacagctttaggatcaggtatatctccgcaaataactactgacaggttactccatttgtagtatgttttgtgataatccctcactctttctatatttgttgatctcaaagcacttagttttcctcctgtgttacgtttatatcctgaatcccccggataaagtttatctaagacttcgaaaaacatcaattcgtcggagtggttttctcttgatttcatctctgagtagacaactcctgagcttgatccgtctgaggtaacatggtgtacatcagtcataaaatttatttcagttaataacggtctaagtacgtggtccaggtatataggcagcatctgcatggttccatcaattcctgctgtcgacagtgtatatgctgtatgatctgttgacgtccatgcatttgttccagacgaaagtgacttcatggataccaggtccaaaatccctctaatggggtgatttttgcttcctaggaatatcaaatgctccagcgtgtgaggcaaaccttgatcggtctcctctcttgttggtactactatgtatgtgtttactattggtgtttcatattggataaaaaacacacggaggccagttgaaagcgacaaatactccgatatttcgacatgttttatcctaaaggatgtaagtttaacaaatccttcgtaatcacaggagaaagaacctttcatttctatttttgaaagggaaaatgtcaaataatgatgatataaaccatttaggttatacaaacaaatataatttatgaagcattaggggtaatttgagagaaaccctagagaattagctgaattacaagtattacaacaatatataactaaaatacactatataatatgaacacattatctttcaaatgaccatggggatataaacaattaaaccctaacgttaacactaaaatcacaatttctgtttagtcttctctatcaaattttacttatttacatttagattttattgttaatatcttgcttcgtaaaatagccatggataagggtaaaattttgagttctttttccaaaattcaacttaaatcgaataggaatcctttaaaattatcaaaatcagcaagattttccaattcctcaaaaagtaatttcccaaatgcagccttttattctaattttgttaaatccggttctggattcttaaaccttttaccgaataatttatctcaatcttctaagtgtttctattcaacttcctcagaaggagatgtacgttttaatgataaaaactacactaaaaaactatatttacaactttattaataattaaataggtatatcagttcaaggctgagactcagaagttgttgcaaattgtggctcactctctttatactgataaggaagtgtttgtccgcgaattgatcagcaatgccagcgatgcgttggagaagctaagattccttgaatcaaccagagagggcttggctgccagcaaagttgatcctgatgtcggttacaagattaggatttctgttgacccaaagactaaaacttttacaatagaggtattttgttttattcaaccattgttattaggatactggagttggaatgactaaagaagagatcgtaaacaacttgggaactattgctaagtcaggttctctggagttcctgaatgatccaaatcttaacgctaaagataaggctaatgcaatcattggccagttcggtgttggattttacagttcttttgtggtatcagaccgagtcgaggtgtttactagaagttatgaccctgaaaaggatccaaaaggttaccattgggtttcagatggcactggttcctttacattaaagtgagttttcaacaattctattaaactcctatttattttagggaggtagataacttgccaaggggtactaagattatctgttacctcaaagatgactctttgttgttttgtaactcaaacaatgttaagaaggtggctgagaagttctcgtctttcataaatttcccactattccttcaagaaaaggacaaagatgttgaaatcacaacccagaaaccactatgggttgagaagaagtcatcaccagaggaacacaccaagttttacaggttcctctgtaatacttcctggggtgaacccatgtacacattaaactttcactctgactcacccttgtcaattaagtcactcttttatatccccgaagacgcacctaacagaatgttccaggcttcaaatgagcttggagtgtcactatattccaggtatttgtagctaatctacacaattatttataatttatcaggaaagtgttgattaagaaaagtgctgaaaacataattcccaagtggctgttctttgttaaaggagtcattgactgtgaggacatgcctttgaacgtcagtagagaaaatatgcaggacaatcagctgatggcaaaactctcaaacacagtagtaacaaaactattaaagtttttacaacaacaggtataattttcagtataattcatattaaattccttaattatatgatttctcagagcaagagtgacgttgacaagtatatgaagttttataacaagtacaactattacttgaaggaaggagcaatggacgagtattacaaaaatggaaagcacaaagacttgttactttcattattaaggttagatttaattaaatatagctgtatatattgatttactttgattttcgaaaacacacgaaattatattaatttttagatatgaaagtactatggatgaaggcttgactaccttggacgattatgtgagtaacatgagtccggaccagaagaacatttattacttttgcacaaccaacagacaggtactatctttttattttaactcttattaataatttagatggctttaaatagtccatacatggagacattcaagagcaaaaacgttaacgttcttctgatgtatgacgaaattgaccagtttctatcaatgaacatccaggtattctaattgaattcactaataattgttaggaatataaagataaaaagttcgtttcaatagactctccagaggatgactttgagttggagaacaagactgagccatcagagtctgaaaaatctgctgaatccagtgactccgaacataaattagaagaaaaagataaggagacactgataaacttctttaagaataacttgggaagcaaggttaatagtgtcaagttttcggatcgcttagtcgactcaccagcaatgatcacaggatttctatcacctgctttaaggtatttagattaagtaataaaaattctgtaggaaggtgatgaaggcaactatgaagggaagtggagaggatcccttggctaacttgccctgtacactggaacttaaccctaatcacaaaaccaacctaaagatactccaattggtcacaaagaaccctgaggttgcaaaagtgctcgttaaccagctctacgataacgcctcaatagctgctggagttgtggatgatccaagagtgatgctttcaaggcttaatcagctacttgaattaaccgcagattacgcctgcaaccaagataataatcaaacaaattaatgtagtacaaatacaccatttcatactatattattttaaaataaatttacaatatattaaacattctaagggtttaggataaaacttcaggacttggaagaaaaggtcttggtcttctcactcatggcatcctgagcagacatgttgcgcaaaatacccttcttgttagtgtcgtaaatatctccgtcaattaaaatctcatctaataggtgatatgcctaaaaatatattaatattataattaaaaaaataaaaaataggaaaatatgttttaccttagtgaagttgaaaaccaagtcgagttcacaaacgttacaaaaatacgaatcaagaatctcaacatatcgttgaatcatttccaaaaccaagagctcgttggcatccttatcaacacaggcaataaagtataaactagcaaacctaaacgacgattacattaaataatttaattaaataagtaggaatggataaatggatgaaaataaataaaaaatgaacaaaccttttaaaaacaactttatattcacgccattctaaaaaattacactgtttaaggctgcgatttaccaccatgtgagaaagatcctggattatggagctcttctcctttgaagttacaggaatgaaccatctcacgaggcggactttagactggcggttaagagaaatgaaaaactttatcatttttcatattaaaatagtatacaaataaaatatataatcgatagttctgatgtgcggtaacatcacaaagaatcaaaagtaaaaaaattaaaacacaattaaatgttgttacttattattaaaaattaacttaatttgttttacattgacagttgttctctaagtacgtttaattccttggtgtttactttccaccactgctcaaagtgatcaaaaggattcagagatagtctatcaggttttggccttaacctagttctggtatttttgcgatcatcataatcatcctggaaggttactttatgtccttttcgggtttcatgaatggaatccactgggtcaaagtcgtacccatataaattctcattttcgatagatttgcgattggtaggagaaatgtagtacaattcactattatcaggcttggaattattgatttgggcattataattgtggagaatcccagaatttcttttcccacccctgcacattatagagtgaccaactccagaccttatgttagccatcattttgtcatatataggagctctctgagatctccacctcctcatcttttccttttctttttgatctaatcttttattatactctctcatttctttgatcacatcatcttcaacctcaacatcactaggctcttcatacctgtattcgttttcatagtctggttggcccctcatctctaatcttggtttaagattactaactatcttttgggcatataaatcctgttttttctgtgttccagccccatttaagagactaactctaccttcagaagcgctacgataaacaaccttaacgttcgtcctaattttcttcggttggattactgcttcaggctcaggaatatcagtttgaacctggacagaactgttaccctttgaagaagatttgaacgtcctgtcaaaatcagataatctgtacatcctccgaccaaccttactgtctttgattatggaaaagttactcaataaatcagtttcaagacctaaaatattgattatagaataatttatttacctgtaattaaattcctattctttgtagttggaaattcttctctaaccttttcaggttcctcaccctgtttttctttggttggttcactcatgagtattttaggagcaagttcagtctccttcaatctatctaaacagtaagttaatgttaatgttaaactattattactattacaaaaaaattaataatacaaacctttctcatttaactttaaaagtgtttctgttaaaacctcagactgttttctgaagtctattcctgtgtttttaacaaattcctgggctattatatccaaattctcaaatccactaatattgcataaaccacccaaattagttggaccagtcagacccactgacccattagtatccttgggatttaaaacattgttgttaaggaggtttagggagtttaaaatcttatccagactgttattcgattcatttaggagtttatttattaactcattagacccgtaaaagggcttattatcgacagttttcttatgaagatcaagagttgagagaatatcgtatgtgattgaggtatcaagtccttttttaactgaggaagattcaaattgatctcctgttttgtcatttaaaagctccgtcagtttatcttcattcttaacttccgttagttgaccttcacctctgagtagatctgcagggtcctttagtagtatttcagggattttttcctggttatcctcaaccatttcgtcggtaaggttacacgatatgttagaggtgttcaaaagccacatcgcctgagtcatgtgcctaggagtctcactaggaccaagagcgcctccttttgtcatataagaaggcgatgaaagtctagtactacacctgaaagcgtctatgttatcacatctcatatgacagttgtagccattaccgccataattaaaattgtgtttatagtcatgttccttgaaaggagcgaatgactcaacataataactctgagaattccttgaatcgttgtttgaaccccgtaaaaggctgtttctgacatctgagaggagacctcgagatctattcagatgttcgccaagctttctatttaccttgtttttggtttcctaattaagaataattacataaaataaacatacgtaaaatttattccttgatttttccacagaaagtgaagaatctgccatattcaagatccttaattcctcaattagtcgataattaatctcaaatatttacatacacattaagagtttggaatccttccaaacaagactaatatgcataagtaaagaattgttcagaaagtttgttaaaacccaggattctaatataaaacatgaaatgttagagaaatcggacgaattatgtaatattacgatagatatgttattaattaaaatttatatatagtgaaaatatcaataaaaaattttagtctggtttggtaattaatatattccagttagacaggcgagaatttaagaattggtttgtgctccatgctcacaggtgcacatgagttgttgtaaaactactgaattccatgattaaaatgggaagcaaatacattttaataaactaatatttattttaatgtattttaaaacaaaaaatgatgataattttaattatttaaattatttttacttagatcacacatcacattgacatcacaaaatttcaaagaattctgattgacctttgtttttacattttaattttatttatatttaattttgtatattcctctagattataatgttttagatggtcgtgccatctttttattttttaaatgtagttttattctctcaaaatttaaataacagttagtttaaaatgaaaattcctaattattcttctaaaaaatcgaataaaacttcaatgtgtgaacaattatgtataatatagtgtagaattttgtcgatatggatcccgttggtgtgattcgtcctctgcctccagaagtcataaagaaaatcgcagctggagagataatagctagacctagctcagcaataaaggagctgatagagaatagtatagatgcaggagccactgagattcgcgttaacctaggctcaaaccctctagatttttgtgaaattatagacaatggttccggagtctcggaacaggatatgttgataatttgtcagcgttacactacttctaagacaacaaactcaattgaaggtgtaagaagtctgggtttcagaggggaagcactctcatctctgtcccagaacgcccacgttaccatttcctctagaactgaaagtgatgctatgagaacaataatgacttattcagaatgtgagcctgttttagatgaggtgagatatgaggatggacccgtaggcttccacctcaagtatgaaaacctgttttacaactatgaaattaggtctaaaagtctcctctccaatattaactctgaatttatctcttgtttacatttggtacaaaaatattcaattcactttccaaatattaatttcgtcttcaatagaactaattcatctattctagatctaaataatgtctcctctcaacagagttcaggttctggctcaggagattcctgttctagccagcctaattgtaattttagtacctcctctagattcgacgactgtgattcatcagatgatgaacttgaaataacactaactcagaaacttgattatgattatcagtattttacgaaaatgtatgataacccagaaaatgacgaccttagaactgagtacattagaaacgtagataaggttagcttctcttgtttgagggttattagagaaaacataaagagaatttatggattaaaagttagtaatgttttacaggaagttgtttttaacaactttgataatttgttcttcaactgcaagggactcatctcacatccaaatcagccctgtaaacttgatatgttcatattattcgtcaacaaccgtttaatcgatttgcctcatttaaggtataaaattctattaatctattaattattaactttaggaggatgatttttagcagttacaatgatattagtaacaataggtataggagattcgtctatttatccattttcattccctatgacaaaatcgactctaacattcatcctaccaaaaagaagataatgatcgaaaaccaagctgaaattgttgaccaaattataaagttcttccacgtaagtctattgttctaaaaaatttttttaggagaaaatcactgatctcattaagtctgcaaccacctctacatcctctggaacctctattaaaatcatacaagattataaatcctcatcagtactattcttaattacttttattatactacttttagatttaaatataaactaacacaatttcgtaggaatttactaacaagtttaaggagaggggagtcaagagacaggctgatatatcctatttcaacagtcagatatatgaaactgcacctggtactgactttatcgggatagtcgattaccacagctcaggatcagacggtgaaggtgttcgagtagtacctgaggtactagaaagtcctgatagggagaagttctttctcccttactacaccaccacaactgccgcagggagtcctgtactcactgaaatcgaaactcaagctaacgataaagtcccaccaaatctattcgactctcaagattctgcagacttatgtgactcaagtcaagtttcgaatcccattcattctactcatctatctcacacctttcgcccaactcacttgtgtcatacattaaattcttctggtgtaaagttcaaatctcaagagttagagtctgagaatgattgcggattagagtttgaggaggaagctgaagaaaacgagtttcaaaatgaccccaatctgattgaaagctttgattacaacagactaagaattgagaaaatgcagcaaatcagcagtctctcctacaaccaaatcgatgataataaaaagcttggcagattctacaccatggaggaagttcaaacgttagctctcacctattttacatcagttacatattatatatatatatatcattctggcaatttgggtctacatattattttaggattattgacgagataatccagaataaggatgaggatttgaccaaggtttttttgggctcaaattacattggtgttgttgacagatcttacgtcttagttgagcacgaaggaaccttatatatggtgaacattctaacagtatcaaaaggtatttttaaaatatttattacactatatatatatatatatttagagtgttgttatcagagtattatttggcgtcttggtaatattccaacctatgagctgagtatccctgtttcattacataagctacttgctcacgccattcacaagtattacgctgaggctgaggtttctgatcttctcgatcctacgattattaagatactcaatgtcttctttgcgttcgaaattaaggtaccacttaactcaacctatattatttttgtaggatatgatcctttataagattcccgacttgttaaatgggtatttttctggagaagagtatttgccagacctgatgtacagtattttcaatattaaggagcaatttgtcaaggacgttgtggcgaaaattgccaaaacaatttctttttattatgtccagccacctcttgatttagctgagtaccttttagtcaactctattctcacaataactcgtttatttcattttattttatttgtttttctcaaaaaattttagggatgctattgactgtaactatgagcagtttatgcatagaattttgtactctacttgtcagaagttccttgacctctcgattccacaacggtatttttatccactcatgattatctataggttcaataacaacggcgcatttatcaaattatctagcatgaacgttttatataagatttttgaacgttgttaatatattttgaactttattttgaaaggtgttaatatacattgaactatacatattttaaagttgttaatttatcatataattccatatatacatttatacatatatgaatcaagttgtataaaattaatatatagtgaataggagattagtctagtttttacatgtctccgtcatcatctattgcgacgtttgcggcggcttcaagctcacgctccgattgttgaactagcatagggtcaattgcaatttcaggtgccttggcgcactctccgacaaagacgagctgaggtttgtttaggagcctgcgagcgagccacaaaaacggacgctcgaagttgtaattgctcctggcactcaggtcatagtactgaaggttccttttcctgtggaattggatgtgggctgccttgacctgcctctccttcacgtcagccttgtttccgaccaggaccattggaatgttttcgcacaccctgacgatatccctgtgccagtttgggacgtttctgtaggtgatcctgctggtgacgtcgaacattatgatagcgcactcccccttaatgtaatagccatctctgagtcctccgtacttctcctggcccgctgtatcccacgcgttgaattggactgtgccacagttagttctgaacttgagcggatgtacctcaacaccgagcgttgctaaatttttattagaattttcattattttatcacagttaataatattttatactagttaataatattttatcatagttaataatattttatcctagttaatagtttaaacggtaaagttatcggtttgaagacttacggatatatttcttttcaaactctccagtcaaatgtcttttaactagagtagttttgcctacacctccgtctccaactaacaaaagcttgaactggggaacctcctcagccatcttgattatctaaacgaaatctattatatctaggatcagaaaaattaaaggtggtgaaaaaatcaaagtgattgaaattaataaaaaattaaccaattaattaacggacaggatcaggtaaaaagatcacaaaacaaaaaatttaaaaccaaaacaaatggaaggcaaaggaacatcgcaaacgatgttgttggtaaatcttaaaaaaactagtagaatccagctaaataaaaaaacttacttaaaataaagagtgaacaacaaaaggttaattaaaattacaaaattgttattaaagagtagggaaaattgtatggaactatgtacaactaagacgataaaaattaagtatcctttaaagggggaatcaatatcttaccgatctatatatataagataaaaaatagtagagtattgtcttagttgatgttattaaacttgctacaccccattctagacggttattgggtattacaggttacgcaagggtcaatgaaggccttttattcgcacatctgctccaaaatttatatttttatcctttacattttaatttattttatctagattccgttttcttagttcaggaagttcggaacggacctttatactaatctctgtctatgtgtatctacaccgaatattagaaaattaaaagggttaaacacattagaagtttttagtattattttttctgcttctttgtcggtgatcccttaacttctcccttactttcacgcaacgcccttaacatggattccacgctacctgtggccaaatcatccctactcatctccatgaacttctccaagtggaattttccaaaaagccttgtgaacctgaacttgaaaatagggttgtttttacttctttcgttttcggaaatatcgttttctgggtcctcatccatgtccagcttcttacagtagtcattgaacttcatcaacaactgatcatcacaactcatctatgttaattatattattaaactcttattgttattataacaatttcgtggtttttataaattatatagtttaataagttgataatacctttgagaagtcatgctccgagtcttggatataccagtaaactgactctttattcagttccatatttgaaatcagtggaacataatttactcctattgaggagtctttatctccaaatttatgcgatatcttttctagctccctcaaggttgttagaacgtttttgtcctcagtttcgggctcgtccaattccacatcctcaggaaagaagttaaactctgaacgaaccaactcgaatttgctatcactaatcggctccaactcatcattacagccattcaacttccagttaatctattaatttatgtattaaaaggagtattgagaatacccagtgttgttccttatcaagcaaacaatttgtcgttatagccaaatttctgatttttacaattgttgcccagatgttcttgtaaatgttatccaatacagttgcacactaaatcagcatatcatagctgaaatatggaagaaaataaatggttagtatcaaattaccttatccttgagcaattggtatgttgttgattctttcgactttttgtgaaaagattttaaattttggaaggataaacacgagtacactaagaaactggaccaaaatgtcaaatccatagccttattaacaaactcgcacacaccgccgtcaaactcaccaagtacaaaaaccaaatctggtcccagtgttacagttccactaaataattatcaataccatatatgaatagaccatgttaaggagtctgtagatgcattacctgctagtttcagccagtgtgtttacaaaagacaacactttagtatagtttttttgcaactcatccacatactcttgggttttcacaagtatctaaatcattgtttaaaggtgtttattcgaaatggcatgtaactattagtagtacaatttctgggttttgtaaaaatgtgtacaaatcacaaaagttagaataaacttcataagatggcatcttcacacttctaaaacctgttttctcagttttttcacctaaattattttgtacccaattttagtataatatattatatcaagttttgtttaaaatagtaccgatgttaaggtatgacttaatgtcatagatttggttgggtggaactttagttgttgaggacgggagtagtgattcgtatgttgctatctcataatcagatatactttcacattttgaccttagcgttgttctttctaacttattccattcctccaaggtacacttatttaccggtttagactcgcttgttactgactggcgattacaaactaagattttattagagagttatactagaatattaaaatctgagtaaaaaaacgaacttcctaaatgtgaaattggtaagcaaagtgccaacaagaatctcaaatggaacaaagtcgaggaatgttgtgaatcatgtgaaaattggtcaaaattagactcaaaaaccttcactagcccaattaacttagctccacaggtttgtaaaattcgttgtgaacttggattttgttccatctccttgaagatgccagaaaaatactcagtgttatcaactacaaaattaccaaacaccaaacaactctcatgcgataaattctaaacacccattaaacaatctttcataccttgactaaatctgttaaaaagtccaacagggttgataaatcaacagcttttgggaccagcttcataaataccctaactagatttgtcaagggatacactgaaaattcactcaattctccatcattatactaaatcattaaatttatcaaatctcgattaccagtatgaaagacgataaaagcttaaaacaggtcaaaagatgaccttgagctacacttgttagtaaggacgaagaatcggattcttttgaattaggcgatatttcttctttgtaattttcgagaaatttaagtatgttagaggatacgagttccctggtggtgtcactgtccataaacgggaccaatttatgagttttcttggctaaacatcggtttaataatcttaaaattgtaaaaaactaacattttaactcattgtacagggacgaatcagttaaatatgaccaaatttgactcaaaaactttagaaacagaggtattttatcagattcctaaaaattataaacaacaaagcacagcaaaatttatttaccttaaaattctcaaaatctgagtcttcagagtacttatatgagtattttatgatatggtcaaaagggaggtcagataatggagattgtaccaaagtgtcactagaatctttggttgtttccattattatacaacaaatattaatacatatacatatttaaaattatatattaatgtaaatactgtaatatgattaatatatgtagggatactcataataaagttttcaatatatttaattttaaaaaacaaatttaatttaaagtttaaaattattctaaataaactaaaatatatttatttagataagtttgagggaaatgtgttattacacaagattgaaattttattttctaattgcatctcggattccacttttctgaataaattcttaaagaaccaatttttataaatgatttagttatgtttcccttgaaaattttattgtcgcaaacctcgtctttaccgtccattaatatgaatcataattcaactatttagattctcattgttttatactggatatttacacaaaatggctatatatgtttagttctattcttattatataatttcatacaatttcgctataatttactgaaatcagtaaaagattccagacttttactaagttactaccattcctgtattatggaaaaataatagtatttacgctaaaactagcaatcatattaattgtttaaacataaaaatgaaaaacaaaaatgatacaaagaagttttcgctcagaaaacttaatgtgttatttttcatattaataagctttggagtttgtagttgtgctgatcaggatgaaaatgggataatttgcattaaaagctacctaaaaaacataagtttaaatgaagcagaactaaaatttgaccacaagaagtttaaatataatgttgaaattgaagagtgtcttgatagcatagacttaacccttgatattccaagctggagagacgcttcaattgggcctatagacttaactactaaggctaatttcttctcaaggctctttaaatcgcatacaaatggtgttgtatttaacaatgatgacgttataaatgtaactataaataaagaaccaatctacaagacgagggacgcgacggtaaaactaccattaaaatgcggatcaaagtaattatttaattaatccagacagtttattacatttatatttagtttatcatatctttaaacaatctaataaatttgtagtaacctttttgttataaaaataaatgtgcgtgacaatttcgaagtgttctcattccagtataaaattaatataaagataataactacaactatggtaaaccatttaatatcactccaagctttctctggaacaacaaaattggaacatgaacccacattatcaaggaaaattttcgactattattactacatattcctatcaatgagcaatcaaagtattaccatatttagttttatcgatatttaactaataaaatctctcttaatttattgattagtaaaaataactgccaaatgtaaatacggaagtgttagatttgattctactaaaaccaacgaattctcattttcaattcgtgacgttaataaaacaatagaggtattatactaagctaattaaaacgctgtgatttaggtattatgcccaaatttggcagttaaaagatttggatcaacttacaaagtctattttattcactctttggataagccagtaccacctcccattagcatcaaatcagtttactccaacgaaaaatgccaagtataaaacaaccatatataaaatattaatgatgtgaataggtgaatactagtgataataagcttacaaggatagtatgtagtcagaattttccgaataacaccaagttattatttgaaaccgatcctagatacaaatatgaaataattcgaaaaatcaaagactctgaggtattaagatattaagtaaaaatgtttaggaatcagaggaaatttttagcggcaaacctacatcagatgtaaatttgaagaccataacagaaatacgagccactgcaggaaagagtatcactaaattctctttccaaaaagcggtaggttatgaatacatgggacggttctacaagaacttaatatactttcttgtttttatcccaaagtggataataatttctacaaatttacttcaagcattcttggaacataggtttggtatggcatttcatttctctccaataataggaccatttctattacttctttcagaaaacatatgttcaatatcggctcaaaacgtataaaacattacttatagattaaaatatctttatttatacaaacctaataaataattgttaggactctgatatggtcgactactgtaatagttttagtttgcttaagatacataacaaaaactcaaattttactctaagaaggtcattatttcacaatgtaagttattgaaaaatcaatcaatttgtttagattttaataatggcagtaatttatcacataactgtgaaacgacaatcgaaaactgttcagaaaatcaagaattatataccaccttcactaattgtagactcacttggcttcaaattctgcttttactttttatatattttatcggtttgtttcttatttgctcaactatttttagatgttgttctcaagaaattctggttttaatattcttagcaatgagaaccgagttggattggttggaatactttcaagcttgccttcagtgattttgatatgcataattttaacaagttttgtcaaatatttaataaatgattttaaaaaaacaatattaaaaataaagaaaagggaagtggtttgggtagcagatgctcataatccagaacaacaagatggttggattaccaagttattaactaaatttaatataaaccagtacgatggctactggtctgataagaactgcagtgttctatgttttccattcactaaaacgtatgtttattattatccacgttaataaatttatttagtaaattgagcaaatttgtaccctttttgaagaataaatcgtccagaaaatgtgcaactataaagaatattaatataagttttgagctctgcaaagagtatgaacttactaaccgtgttgtacctgaagttatagtattagatactaacaaaattgatggtgatgggattagacttaatgacccgatgagtatattcaagaatactagttctatagcgtatgctgagaattcagacttgttatttgggtcttttgaaggcttatctgagataagctctaaaaaagaaacttatgtagaaatccaatcacttcaaaccacaaatcaagatttaagctctttgattgtcggaaaggtaaagactgatgatctcacttattacatcgatttaaatgtattaagaaatacagaatcaaaaactattgataaattcttgcctgttaaagttaaagttgatcaactcatggtacttttctaatattaaacattctttcagagtgcggacatggccaattcccgtggttttaacagaaatgtcagaattttaatgattgataagtttgttttcctttttaaaggaatcaatgctctctttttcatcttttcaatgagacataacgcatcaacgttgaatctaattaggacaattcttaacactttgttcactctttacttcataggtccgagtttacacataacatagttatgaaattaacttaatttattccagctattccattaataatttgtttaaatgcatatttgttacagttgcgaggccttatttgaacatttttgacaatgtttttggatttttatgtctcgcgataggtactttgtacattttcaagttcgggttctacgagtttataatcaagccaaaaagtattgggcacataggtaattttcaaccttaatatcaatttcatagacaatctgatcatattatcgatcataataactgtcgtatactctcttttatactcaatactgtactcaattgacctcatcttatcattaaagaactcaaggtatattagtacaagtataacatacatacatgtatataacaatacaaactaataacatatatagcactgatgaagaatacgaaagtaatattgacataatattatacataaaggagttgaggttaagtgagaagatatctggttactgcaaaattccagtaatgattggaatcatttgtttatatgacgaaaagattatactgagggacgaaaccctcaacttccaaagacctacgctagctgtagcatgtaacgtaatttgtacagagttcttcccatttctttcattatttaacaaccggggagactgtttttcactttcaaaagagtacgttattttattaatcatcactttagccaatttacctatgccaacttgggcaagtatttggacgagatttacaacaaaaaaagttcaatgattattgcaaggtatttaaatttgtttataatttgtttagtaatatacaaaattttatcgttaacaattcgaaatgtaactgtttctcgatacaaattattggataatacagtacaacatgtatgttatattcatgtatggtgtattattaaaaagaataatctactattaaaaaatatattcttctattccccagttgtattgtaatgtacttgtaatcattcccttcactggttaatttgactacgtctttttctgtcagagtatactttacatcagtcactacatttccattcactttacaccctccttcctttatgaactttttatttgtgtgaaaaaaggcatttgaatattgaggtactctaactgtatccaatacctccaacagctcaactccctataaatgatattagattaatgtaataatatataaatgaaatcacagtactttggaaagttgttctgtagtaaggtttatatgaggcacggctttagagaaattgatgaatgactcaaaatcttccaaattagtaccagaattagttaaaaaaggtgttaaatcggaaaaattcttagtcatacagaatttatgtatcaactccacagtctggtttccatacaacaaacgcgtcagctcatcagccaatagaacctgaccacaattaattttagataaaaattacctttccactattataatgttctaaaatagactcctttattttatccaatgatacatcagtaaaccatttcaaataactacatcataatattatatttatatttatatgtatatggacaaaaatatataggaattatacttttctacttctgaatcatccacgcttctgaaatgtgaccaaaattcatgaggtgaggttttgttggtaatttttaagaagcagtttgacccagttttactaattttttcaccgaatttatccttcaaaagaggtgtggttatcccatatacattcccgattccaagtgaacctaccataaacttccattagtgtcatgctcacctgctagttcaataccagaaacgatatttcccatctgatcattaccacctagttgtattttacagttaaaattttgtgcgaggtatacaaagtccattgcctggagtgacatatacattaactcagccaggtccatattaatgcttttcttatacccagtcccatccttatcaagcatacgtatctttatacaatctctagctaacattcttcctacattcatattccttgctaccgtttctaggtattccatcaagttcacacgattgtaaatatctctgttattaactatgaataccctatatggtttactcatctcagataaaatatctaaatccgattccaaatttgatactctaacaacctttggtacaacaatgacatcattatataaacctgtgttttcaatctttattggtctagaaagtattttagttgcgatttcctcaattgcttgttcatttgttgtatcaatttcagaattatctttgtttagtataaaattggaaaaatgaaagttatcatttctgtttcttcttaatttatatgaagggtctccaactaacgttgttcctccacccagaaccaaaactacattaaaattctcggacaaaaatctcctcagtagcaataactggaacaacgttccctcatgaataaaatcattagtgcagtcaattcctatcaaacatatatgattgactaaaaaataccgtagtaaattgagttatacatagaattattgaagttttgagtttggtaactggttaaaagttgatccagtttaacgaaatcagtagactgtgaaatcattgaccgttccatgcattgcgataaaattcttgacacgggttcatgttctattcttgtaaaatgagactccctgtccagaggcccttccaaagacgaaagcacaaacttttgcgatagttgatctagtttgtttggggtttgataaccttcaaatgtgcaaaatttagattttggtaagattacaaagcattctgaaaaatcaaattctaaaatataaaattacttgaaaatgtgattaatatggcacaaattattgaaaatttagtcaagaaggttgagaaagataaactaggtaacatcttccatattcataacggttcttaattaaacacatttgttaattttatacacacataaggattttattgcttataaacaatctgatgattcaatataccatgatttaactagttacatttaccgatagatggggaacatagacaatggaaaataattaataaaataaaaaatatttataaaacttaataaacaattatataacaataaaaataaacttcaatagttattaaataagataaccagtattgggatttatcaataaggaacattcagattctatacaagatggacacacattaagtgtactaaagtttaacagtaaatgttatttactattagattataactatactaaattaaataaattagaagactttaaatgcatctcatggcatacaaaggaatatagaccagttaattcaagtaaaacaaaggaattgtgaattaacctcaaacctctacacatcatcgtaaaaatcaattatgattcttaacaatttatgtaattatttttagataattaattagaatttaatatcccttgttgggtcagatagggtatttaatggaagaatatgcatattttagttttctggttaattccttacacatttaaaccagaccttttctctacattctcacaaaatttatatttatttaagtgtcagtttcggttaattttagactagttttgttactctttgtacattataggaacgtgcgtgtgcgtgtgaacttgttattatttgttaaaggcatttaagtataacaaaccatatttgaactcattttaacttcattcctaacgtattttgcccatattaagtatatccaagtgctctgtgctattaaattgatttgtaattaatttaaagaaattgttaaaaaatttaatatttattataaaactaatgataatataaaagttagatcgtaatatataaaaatgaataatatggaatttaatgaccaggattcggatggtgtcgaccagtacgttgatgggtatccatacggttctactcccaagacctatgatagtatgcagtacaacccttctgggcctgtagaccctgactatatggccgaggtggctagtcccaggggtgaatctcacactccttttgttggattttttagctctaaattactgagatcgggtttcactttacagactgtaactctttctcttatgtttgtattctactgggcctttggaggcactgggatattcgttttcgatctatacgctgctcctgaaagcgtcaaagtttctaaaccctttcatcttaccgtttctactcttatggcactttatcttctaggcactctttacatcgccatgttccaagttttcgttgcagataattctaagtataaaccatttatcttttacaacagttatatatatatttatcttcaatacaactttttgaatattgttttaggtctgtgagaggatttagggctgggtctaagattttatctgccgctgtgactttggacttggtgtctaacatgttacgtctagttcagtatgtatattcttactttttcatgagcatgaaatggtggactagataccagcaaactaaggctgactggatttttttccaatttggtagtttttcaaacagttttgccttggtaatgtatggagctgcattcttttacctcgaggcataccatgatgagggtacttccgaggaggttgcctggaccaacttaactttattttccttagctggattagctgagctttttatggttttcactggctacggtgcacttttcagccttttcttactattggctaatttcagtggcaccttgtgggccttctctttcgagcctcttttggacaagtggtctccctctttacactccagggacgttaacgcagatttcgttactgatgactctttggtttacgacccatattctcaatactatcccaatcaaaacttgactgatccaaatttaaattatgaaaataatctaaaccagcctggaatggattatcacagttcacctggcatgaattaccaaaatgacgttaatcccaacactcctggctatcaataccagggcggattcacttatcccttcgagcaaaagggctacaatgaatttaaccctgtgaatttcaacaatttccagcaggagaaccccaattaccttgtacaaaattacgcatcttaatcttttctacttcatctggcaaatgtcattttatatactatttagttctatataatataattattaattgaaatcacattacacatcagaacaaacttcaaatttatcataacattatatattatatgatataatatgtaaaagggttaaaataacattcgttttaaaaatgatttgtaaataggttcgaaatctcccaagtgtttacttggaaatgaagatattgtctcaaacagcttcattaccaactcgttacgcaaactgaacacagttttaaaccgtggttcttctatcatatgcttttctattatacattctattccacaatgaacattatcattgaaaacgttagttgcaccatcatcgagtgtaatagttgaatcgtgtgataatcttctggtagtactatacacagtatctgatctcatcaatttctccctcttatccattgaactaaatagactttcatttgtttgttggtttaataactccatttcataatcggataaaacgttaggatttgtaaacttcttcatgaatttaattcgtggtgtattatttattgcatattttactaccttgcgattttcaattggtatataaagctttgacaaatctaatcccaattttaaagccttgtcatatacttcataattacatatatcaactacttcttcggccatttccacctctacaaattcttccccatcatctcctggggtttcagctaaatcagggccaatatcaagaaggaatttgcttatggtactagtattatatggttcaatcatcttacaatcatgattacagttaataactggacgatttcttatattaaactcgttatcaatgttaaaatcattttcagcgtcttgtatttcagactctgttgtcccacttacatattgtattaaaagcgatactaaccttttaataacactattttgtgttaaatttagcgattttacgttcattatattctcatccaaaaagactctagactcatttaatgacaatagaaaatcaataattcctctctgtatcgagtacacattattttcaatcaccatattttcattaaaatatgcgtagttaaatctaaaatgagggatcaataacagatagtttccgaaaaatatcccgatactctcagtacttcttttaaaaaactccaccattaacaggaaacttgtgccaaaagctagcatgtggaagtaactcgccaacactttatcaactttctggttcattcctgttataggttcagattgtattattcttctgttagcagtaagaaaattgcctttatacttgaaaaatcctgcggaaaccagcgactttagtatattcaataacttcaatctcagcatatatagtggaggaggagggtacataaaccttttaaacaaacttgcgtaatcgattttcaccaaatttttatactcaaaattgcctgaaaagggtagaaataactcgtgtaacgttttaattcctaaaaatggtataaataaatattttttcattttctttattattgatgtccttatatccttatccagcttcaactgaacaaactcaaacatattctcgatcaacaactggaataaacttaaaaaacggtccaaaacatatacaatcaacaattgttccattaaatcttcatctttattaatcctcatcatgtaaaatggtacaaaagttccttctaagcactgcttgtatgtgtccaaaacggtttctttaaaccctaattttatcaatattcccttcaccaataacttaaaataacatttcttttcattcaatatctttgagtctacaaattattattgtatatataaatctataatacctctgttccttggaacaactagtaagatagatagttctggcataactttaataacatttgttaacaaatcaagtgcttgaacaattttatatttataattagttttctcaattaacattagaagaaagtccagaagatggtaaaagtaatctattcctttattgtacaacatttctataaattcaggtctatacccaagctctatatatacttcacctattacatcctcattattccctatattattatccactacagtctctattgagctggagcttgtaattccccttgaaaggttatcatattcatttgaaatctgttggtataagtcttctttatcatgatcaacctcggtagtgtttctttcacttccacctctcctttccccagttagtatttgtttccattcatatttgtatattaccacctaaatcaacatataccttgtattattatggtatgtgttagataattaattgaaaaatacaagttgatttattaaaaatgtaagatagtctttctttttggtaaaatacacatccttctctcctaaaaattagaaaggtaacttttgatctgatttaccttcttttatagatgtttcaaggatatatttgacaaatggatccaaaactgtagaaatgtgtaaatcaagtttggattggtgtgatctccaaaggtttgaatccttgctgaactgttcatcactaaaagatactgaggatgtttcagtgtcatatctagtggaatttatgctatagctttgatttttaagggtatattccttcggtggaaggacggaatccgaagatttagacttttttccttcattggggtacaaattatcaagctcatctattactttaaacaaagattcatcattaaacaggtccgagtagtctccagataagtccatagcgatctttaaaagaatctgttacacaatcaagagaagatttcatacacattctttgtaaaccaattcatttacaattaacaattagtataatgtaattaaaacattttaaataaatttgaaatcatttatacaacgaattttaaaaggccattttaattcaatttaatattcttttgagaaacccaccaacattattattttacacaaagacactattttatccagaataatatttagtatattcttataatgttgagatatgataaaatttgttcttttaattaataaacgtggccaaacaaggctcagcaagtactatactaactatcccctcgaggaaagaacgttgctggaatccgaacttcttcgcaagtgtattactaggaatgaaaatcactgtcctttctttacctataaagatactacaatagtttttagaaggtactttcttactactattttacacataatttcatattaatcattaacctttagatatgcaagcttattttttataattggcactactagtgatgaaaacgagcttgagatttatgaattaatccacaacattgttgttgctcttgataaacacttcgagtcagtgtgtgaaattgacattttgtacaatttggaaaaggctcacctaattttaaatgaaatgatcgcaaatggacgaattattgaatgtaatatcgcaaacgtactatatcctctctccgtattagagaaactaagacaatcagattaacgtaacacctaatttattaatttattaaacctaaattgtacgaagaggtatttgtaattgattagttaatgaagataaagttggaacccatgtgcatataacaccttttaagaaactctttaaagttttcttgatccttaacctttgggtgttcattacaaatgttattaaaaacaggtttaatcaactctgtaagttctttctcatcaaggaacggtgaatgtattgtatattctattcccctatcaccccttaattgtatacataatattgttatatctgcattatcttcaacttcatcccattcttccagctgattctgatgtttaagatcaaatttctcagttatactcattttcttaataaagctatatttacacttaaatatactatcttttgtttcctcaaatacttcatcatcaggattattcctattttctatctttttcttaaatgtggccgtgtatattgttattcttctaatgcttaaaattggagtaattgggattatactctcaaatttaccatcttgtatcatactatacttacccacattcagtaaactaaacattaatttgcatccttctgagtgttctaagtctttattttctatatttttcttatttttacaaacattttcaatgttactaacgtacaagatacttaacatagttgggtaattaaagttaacaaaagcctcattcttagtacttacatcatataaaggtatcataattacttcactaagcttataaccacttcgaaaacagtatttatacagaaattcaattaattctctcctatcacacactaaattaactttattcacctcatgaatatcaaatatctccttttttaaaacctcatcatagtttgttaaacagtgtttcatgaagtattcttccctataactaggcttacttctttcaattttactcatcaactctaccaattgctcatatattaagctcacatgattacacagcattctttttttattatttttatctagctttatttcatactgcttcttatccaaaccaatattaccatagtctgggttatttttatcagtaaaatcatgatattcatatttattagacccaaacataaactttaaaaggttagaaattgtgttttttgggtttaaaaatctaattgatttgaacctcctgatcaattcactgacatcatcttcattatatttagtctttgatattaaaaaatctatcaattcagttttaatttcccattcatattccttataatctcttacaacaaagtttttaagctggatcttacaaatcaagtttagaattttgttgataacttcgtaaggtactgccaaatcctcattattactcagcttacttctaatactgccaactgagttcatttaatttattattaaattattactaaactattcttgaggaagttgaaaaattgagaaaattgaaaaacatctaggaaagaggaaaatcttgagaaaaatgaataaatgtaaaaacaaaattaaatttattaaatgcgattacaagagttctgaaatattcattggcatttcgtcgatttgagtagagtagtactgctcaatatccctcaatattctgatgtcatcgtcctaatcaatgttagagtgaattaaacgattaatttttataaagattaaataataccttgacgaagtttatggccactccttttctgccatatctaccagaacggccaatcctatgaatataactctcacgactattcggtaagtcataatttaccacaagtgatacctatagatgtatttgttcatatgtaattgtattatatgtactatataaccaatagttaaataatacttgttggacgtctaaacctcttccccagaggtcagttgagataagaactcttgattcaccttttctgaatctttgcatgatatcgtttctttccttctgggacatttctccgtgcattttgcacacttcgaagttaccgtccttcatcttcttcgcaagccagtcaaccttctctttagtgttacagaatatgacagcctgggttattatcaatgactcgtagagatcacagagagtgtcgaacttccactgctccttctctactgagatgaaaaactgtttaataccctccagggttagttcatcacgcttcaccaggaccttgaatggattattcatgaacttgttagtgatctcaatcacgtcatgaggtagcgttgctgatactagtaccacctgaatggtagggggcaggtatctatacactgagtacacctgttccttaaaacccctattcaacatctcatcagcctcatccagaatcagctgtttaatgttacgggtgttcaggtgacgatcggttatcatgtgatttacccttcctggtgttcctgaaactatttgaaccccggattccaaggcctttatatcatcgctcactttctttcctccaatacaacaatggacctaaacccatataaaattccaattttatagttttactaattataattaaattaataattgttaaaaatcagttaaaaacttacttctatattgcaatagtcaccaagagctaaacaaactttctgggattgttcagccagttccctagttggagacaaaagaagaacctgggtttctctaacgttagaattaacggtctgaagggctccgaggcagaagacgcatgttttacctgtcccgctttgggattggataatgacatctctaccctccaaaatgggcttaattgctctttgttgtactgctgaaggcttatcaaaaccataagcaaaaatgccctttaaaatctcttctttaaggcccaaatcctcaaaggattccaccaacgggtaatcctctgatatttcatagctggaatctccattcaaatcattggccatcttaacaatttctattcctattatttatataattatatttaatttaattgttaaagattatgattttatataatttataattaaatgtcgttataatgttttcataacctgacaatcaaataacaaaattaaaatacacattttttcaattattttacacaatatatatattttatcatataattaaatgttattatttgggattccactctcttctcttatatcctacccttatatcacacaacaacaatttaatatataaatgtactatataataatgataaaatcaatcgattatgattagacattaccagaaatggccaatttatgctactaagcgattagtggagataattccacagctttgtttacaaggtcaaaaacacactgttgtagcaaatatacttttccacctcctaccaaatgattcacgctctactaataccgaccctgtcaatgggtccgattggaacaatttgttctgcaatgactacatggaaactttgaactacttatataataatcactataaactcaattccatcagtaattcaactgacgctttaagtgataaagttacgtttgacagtggtatgaaggaaataatatttagtccatttaacatgaaaatcctaaacgaagttagtcctaaaatatacatttcacaaagagatttactcatctcatctctcgaatactctcttctcaagtgagttttacacattctatttattcaactatatataattaattttgttatagatttagtaaatattatacaaatgttaaagaaaatattgatatcaacggattatatacctcggttggtatagactttttaaaagtaatcaatttactcaatttaaaccataaattatgtgaactcaaccctaatactataaatgatatattttataccctctttaaaggtgacgaattcagccgtattacagctatggaatttttaaattcactactaaacaatactaatagtactattaatggtataaaagttgacagaactgaggtaaattgtagattgtatattaattgttaggaaatggatttatcaactgctctagtagaaggttcgattaggcttttggatatattggtaatgatcgctgaagtagagtgtaaaaagtcactagaattatttctcaacattattcctgaacacatgaaaccacagtgtttactgtttttgaaatctgttgataaacacacaggtaatttatcctctatatacactcattcactcagaatattatgtatatttgtagggctgttgaaatatgaatgggccttcaatgaatgtgaatctatactaaataaaactaccagtcattatcaatcaataccatcaactaatcgtgataaaaccacctcaaatgattacacctttgatgaaaatatggaatatgaattggtagtgaatacagtggcgagtttatataacacctttaaggctttaaaggagttagtccctaataatccccattcaaccgaagaaaataagttagatgattcaaaaactctcaagaatataatttcagtacattttgaacctgatgtagttgtaatatcaactaagaaggatatttatgtagttgagttactcattagagacccactgtacagatcatcactttataatctactgaacttcatttgggcttctaatatacctaaagttggacatcaggtcttacttaatattgccaaactttcaacagagttcaatcaaccattcaaacactacaatcacattattgatctcaagtatttcccacttagtcattcactaaactatgttataaagttacactagttaacacctttataccactattttaacctgttatattactggtttatagataatattttagagatgagcgtgtaaaacgtgttaaggaatataaatatgacgctgttcaagaaataacacattttaaaagaaccagtaatgatatacttcaatatagtaaatatacaaatgtaggtattaaaaagaatctgaagggaatgttacaggagtataacgtgccaataccattaaaaagggattggaacacacacctcagaccaatacccgtggatagaattaaatatctgtgtataataggaagaggtattttggccgtggaataccgtcttagatctgaaggatggagtccttcctcttctctaacctgattctaatgaagttcacctttgattaaatttaattaagactcacacagtcactttgctaaaaaattaataaaattctacacgaaggggagcattttcctcgaaaagaaaatctctcaggaatttttttgtaaaataaataaaaattgtcttcactaatatattattagataattgaataagtagataatatggtaatgagagttcctagtagcatagcatggccctgtaaaaagctagtgccatgcaagagtaagaaaagaagatcgagggaagttagcaagagtgttctgaagaggagaaatggattgataagtagaagtgtggaggcatttgtggaaatagacctcactagtcaaggcaaaaccggatcaattttaagctctaaagaaacaagtagccccaaaaacagtaaataaaatgtaattaagtgatttattaataggaacactggaggaatgtctcaaaaacagtaatttaaagatgaacgatacagaaaaaatggaccgtaaggagtaaggaaaacacatgaaggaatatttcaattaggttatatctatgggacgaagaatcaggttaaagggaatttttaacaataaaaattgtaggattcataattaaataccctctatacaaggaatcacaggacgattgtaagcgttacttaaaacctcctttgaaagcacaaattttaagatttcaggtcactagtaccctcaaacattaaatcgaaaaaagaagatgacgacgtggaaacggatgaaaaaactatagaatggtatttgcagcattcatttatccccttttcacacatgtggtgtcaatacatgtaggagcctcgacgttgttgaaaagtatttgtctacggcactaaatctggtcaagagccagagaattaaaaattaatttatttttaatattccccttttaatttaattaaatttcatcattatcgcacgttttgaccattttgacctttctcagctttttttatcctttcgaaggtttctatgattacatatagatttatttggcctttacaatagccttttcttccccttaatccaattttcctccatttcaccatgtttcgtaaaaggtattctcactacatttacatttatttatgttttactgtattcttcagcttttccctttatctactcttatattatattacataattttataattttgtatttattatattattctttgcttgcagctctagataaatgacatttaggttaaatcagaacaactttttccaccgagggggtggtaacgattcatctaaatcatacgggaaaggcggtggctcctcatttgaccgttaccaaactcgtgaagattctaaggattcctctaaagatgattcaaccaataacagtattatctatactcagcctatttctcattttaccctatacaatcccatattcctgcagtccatatcgactagttaccctcaataatcaatccatattactttatatagtgcaatattgtgtttagagagtacacaacaacagagtagtgaaagacagaaagaagataaagggagagaacacaacggacctggtcaccagaacggttcagttgacgacatgactaaaatgcttctaaagtatcattcaacccgttttaaagagtgtaagagacttgctaactcctctgaacctaacgaaacggaatctaagagctcagttagtcctgaggctaagaccgagtctcctgaaccctcccacaaatcatacaggtccaactacagttacaggtcttcctactctcgagaacgggctcacgaacgccataaattcaaatctgatcgttaatcttttgcaatactacatgatactaattattcttatcttcatttctatgactctattctccacttatagcatgcaactttctatactaggtgtactattcataatatacaagcttctagactagatatactatttaaaatatacaaaagatgagaaacataaaaagagagtctaaaaaattatttgaaagagaaaacctgtaatgtattacaagattggtaatatatgactagtgaatgtactgatacatccacgcagtacttttgtccctttttattggggtctaagaggcccttgatactagaggctgggactgagtttttatatttgatcccccttgaaggggttttctccaccttagaggaatacggagaacagtcgttatcagactcgtaggagtacagataatcgtcaattgcatccttgatttccggtttagaggcgaatttgttcatcacgttcagggatatcttgtactcgattcgagagctttctctgctagtactagcactatccctggtactattatacacaggtgtatttctagagctgttttgaacgggagtgtttctaatactcacatacacagtattagatccgttcctactattagtatacactgtattaggagtatgatagccattataaggagtttctaatccggcatcctggctataatataagtggttgaaggatttatcaaaatctgaaactagagaaaatgaaaatatcttacaacaggctgtgtaatcccagacaaacaagttgtgcagattgtcaatggtcactagctttgaccagccgtcatgtacacactctcttatctcacccacatggccgttcaacgtgcttactgactttattctcaaatcccccttattttgtgaattattcacagagtcaacactatttgaaagggtgttatgagtgccattaactccgttagtggattctgcaccaaactcaataatcaagatcctaatatagttcttgatgataactgcccactttgaatgtctttcaagtgccaacagtgctgttggaggcttcggaaccaagtattgggccttgtgagtaaagttgtaaaaatcaataaagttaaccttattactgtgtgagagtgagtaccccaggaggcagttggcagtatctactgaaaaggcaacaactgaatcgtttacacaatccaacaagtgccaagtacaagttgacacatccaccaagcctaggaagttattatagctaaacacaatcaggattgatttcccctgtgtggatacgtatcttagtgaggtaatctcgtggtttgttatacgttcgctggtttccagtgctataaagttattctcaactgctctgtggtatatgactcctgaacctgttcccacaaaaaggttcaattttttgaatattatctcacgggcgtcccaatacccgagtgatccataaacatccaaactactaaccgtgtcaattactaggctgttaggcatatcatctgaattaatgttgttaatatgcattttaattgtcattgagggtatattgataaatccagaatcctcatcatagtagtaaaataacactacaactgctctctttccagcctttaccttaagcctattaggcttgtcgactccactattagtattacacagtatgactagaacttttggaacatatcctagtcgtgtcgacattgacctaatggatgaatctggtgaataacttgaatcatcaaatcttaaccaggtgcacaacttgacttcatatctgatctccttcaaagccacgtttacattactatatattaacttatcttcgtttatatcatatccgcatatgctgtatatactgtcatatccgttattatacatattgttatatgatttagttggtgtgttgtatcgattatatacagtattaagcgggttaaactgcgaagaggatattattaagaaagggttagaacccagtgaatgtactatcaaggcactatttaagctgttaatgcctataaatttagataattgttctacatattgtttatattggcccttccatcttgaccttttgaagttatccaatattcccaaattaagcattgggtttgatgaaattgtgttattactcttcataatctcaacttttcgtgccgagtttaataatctactcatgggatccgttccctgggtaatattatcaattattggcatttttaattgatacttatttgagcttctttccactccgttcaactcattactactatcattgtacagtctgtagtttacattttttgtataatagtcgaaccaaaagaggtggtgatttactagtgaggcgcgtattggtctagaggctgagctgaggctcaggaactctgaaaagtccaaaaagttacatagcagagctattacatccttcggcgccagtgatatgaaacgctccaacgcgttttccattaagttataaaactactttatcacttactacattttatcatttttgtatccgtttaatacttgaaattccaagtatttatgtttctcacaatacaattgtgatttaaaaatatcgaattacttaaaatttatatttttctttttaaaattattccaaattataattaaaattaaaattaaattaaaaaaataaaatatataatataaatacaggtaaaattgcaatattcatatatcgattttacaccattttcgctaaaagtataaatcaaattaaataatcaatttttatcaattctcttttaaaaagttgtttccaaatataaaatctagttaatattattaaaatgataataattttaatttttctcgaatgtgtatcaaatttcacaactgatgatcatgaacatcaccgatcctttccatatgcattatttttggattattttcatctctagttactctattttatctttatttatcaattaattcacaaattttgctattcttgctgcataccatattctttataccatttaatcttatttcacgatgagaaaactacacattttaaatctcataatactcattatcattggtaatagtggaattcaaggttattataaaggagagggtgttcagaggggaattgaccagaataccttagaaagggtgttcagaatagccgatgaaataggggaatatgctcaatcagttccacacatttttaaaattgttagaaaaaacttggaatccttagagagagaagttaagatcaaagcattacttccttccagtagtagaatcgaggccttcaggttgatttgtgaaccttttaatagattcctgactgaaagtcctagggactactttatacataacccacccagaggtactgcctataatgtacagctaaacaatgccaaggaggctgttagggaggtatatagaagaattcaaaggctctggctcgatggataactacttttacccaaatttacttattttaacaagattttaatttaatattcattttatcattaaattaaattaaaatttattaatgtgttaattaaatgtgtggtaacacattttcctaaattatttcatattttgtttatttttaccatttaccattattcattatttattttttagatttttgtttatttcgttgaaatttgttttaatttttaattctgttcaatttgaaattaatcataaataattattttataaactttgtagtctaagatggattcggttattttatctggtccttctgggtgtaaaatacgtagaaagtacccttttccttctttcaaccaaaatttacctgaagattgctcaactagcttttacaataatgacccagctttacgcaataatgaacttaatggtgtcgaagatgaggaaattgacccttacttgatctggcgcagaaatgctccatttttatatgacgctgtgtctctttataacctagactggccttccttagttgttgaatttatgactgacactttcaagattaagaacggctcagtcactcaacgactacttctgggcacacacacttcgggttctgacactgaatttgctatggttgcggaactcaaatctaatgtctacactatgaaagagtgtttaaatacctgcgagaatttcaatcaatttaaggcagtcccatctagttcttctgttagttcaaacaccaactctgccagtcagggcatattggacataaaagctaaaatagtgcatgaaggagagataaaccgcatctctcaagtcccgggagctcattttctctttgtaactcagagcaataatggaactttatacctgtttgactactcaaagcatccttcaaaccccagagacctcaaagtttccattcctcaaatggtactccagggtggccactcgtctgaaggttatggtttagcttggaactctactaataaacttgtttcctgtgcttctgatggaaccattgctctttgggatttaaactccaaacctcattctactactaacggtttaagtggtgttcttgacggtattggaacaatatctccaatttccacttataacaccactcatactagtcataattctgatgataatgtaggacttaatgacattgagttcattaatgataatgtagtgctaattgcttccgatgatactaatgtacatctcatggatcttcgcactaattcaaccaactccaccagttcttcaaattctacaaattctaacactaaattttcaattggctccagtgttaattgcttaagcttgaataagtttgacaacaattactttgtttgtggctgtgataatggtaagatatcactgtttgacaccaggatgggtaagcaccttttagttatcgatcaccataaagattccgttaatcaaattgaatttaacagttcatgttgtggcttatttgctacctgttctaatgattcctccgtttgtatttttgaccttgcttgcaagggcgatgaacttcgcttcgttcaccagggtcacaaggaccaggtcaatgacatttcctggactaaacttgactattatcagagcgctcacctaggtttcaccatcgcctcagtttctcaggacaatctacttcaatgtttcactccaaattatttttctctttaatttgttatatatatactttatatattatatgcaccggtatataataaattttaacagactaaaaagaaaataactaaaccatcctatttagcatatagtatgatatagtatgttaagatttaacgtggaacgatctccgccagaaggcaacaactcctttggaatctgcggttactaataaagtgtcgtactggttaactgcagtgcacacaactgctcctccgtggaacggtattgagaaggggatattctcgtctgacattgaaaatatcaggatgttcttgtcctcagacccactcacacaccatcctcctccgtacttcgtataacatgatctcaatggcagcgccacgtgattattattcacgttatatctaaatacaaattattgtgtaaatactagggatgagtgaatgtgtaatgttggataatctacgtaaatgactgtaaataaatgtaaaactacgtaaatatttacgaatagtagtgaatacatgtaaatatggttgaaaataagtatatatgggtaaatcttggtaaatatagtatatagtgagatatggctaaaaaaatgcctatgggtgaggtctttaattttccctgagtggctatcgtagacgacgttaaagactaggattgaaccactgcaaacgtttgcaattactgaaggaacgccaacactcgaggttgaggatacaaatgacaacgatgtaacaggtccctaaaaataaaattaacagcagaaaacactgtaacgttggcaattatcgagaaaacaataattaaatagtaaattgtgtaaaaaatactctggaaatttgtttggttagtgactgttttagtaacatgttggactgggattcatacactgaaattgatcctctctcagtaccagccagtacgttcaacctcgtgtcatcaaatatcaaacatcttatttcactctttattttagtcttttgtattacctacaagtatgttcagtgttgtattaaataaaactaatttttattggtgaaaactacacttttagtctagaatatagaataaatacaatctatcccacatattaaataaatatgtaataccgttccttcgttgtagtctacaatccttagcgttgggtttgaattacatgatagaaaacagttgggctgtagtgggtggaactgaatagttagtccagggtacgagtcattgaaaaccttaatcaaatctcccgtcaggacgttccatgccctgatggtgcaatctacagatactgaaagaagctcatcaacattaagctttgagaaagtgaggcaagttactgcctttgaatgcatcttaagagtcaaataatcaacaactttagtattctcatcataaaccacctcaccattcaataaactacataattcttcatcatccctatgaaatttattatattatgaatattataataaagtttatattatgggtgttataaaaatttatattatgaatattataaggtttataactaaatactgtattacttgggattggagctgagtagcttgagttcaagagtagtacgataaacatgaaatatgttaattgatccgtttcgccttcccactgcaactactacgtactgatctgttggttcttctgatctaactgccactgaagtgactgcgctatcatagttggatactgcagccactctcttcagacctagtggaggcaatttaacactgtctcgctcagccactgttgcctggagaagccttgactgagccccggatgaaccaattcctgtcaagaagctgcggaatctctcatagaaaaatgctattgggctcttcgttatgctctttcccttcataacatctaaaccaatttttacccaacaatatcgttatatttaagtatagaacaattaaatgaattatacaactatacaagagtataaactaattttaatagctgtaaatatacttttgggtgatgacttcttgatgttaagaatagttcttaaactctttttagactcgataaagggcatagatttctttataaagtttaacaaattgtcaaccttgacaaataaaatatcattctcaaatgctaaaaatttgttaattttgttagaattatactacagtatggagggagtaatcagaaaagacctaaatattccagaataaataactaatttttagtttaccaaatttatgtatcaatgataaatcagtttgacttttggattcttcaagtaataacaagttgttttggactataactattgaagtgtatttgagctgtacgtatgacataatgatcttgaccattgttatgcactctattagcgatcgctcagaacttgggtcaaaacacacagcaatcaaataactgttcttcagtacaccacgtgtcctatcatcatctatgtattcaccgggaatttccaatacactaaccccaacatcatcacctacattcaaattttacttccatactacagctgtatatattatttaaatatttagctggataattagagctgaaaacggactaaatatgaactaaaatgagtactgaaattactaataaagttacttggtgatagtttaaaatggttaataaaaagctgcagttgtgacaatgagcgtctattattttgaaattgcctatgcttagttaagttttcctcatctgcactgttcaccaaagccatctcaatcagcctactctttccactcttgggaccacacaacactatatctacaaccacctccttcattatctcctcctgaagcactattactctgaactaactggatatctagaaaactaagtaatttaatgtaactaagatttaaatgactaaaatgaatgtatagtgatactattaaattatagtaagagaataaaaatagtatagagtattacagtgttggccagctgctggtacgaatcaattttcgacatcggagatgtttctctcacatctaaatcgtgcattagttgatatcacctagttggatctaactatataacaggttcttctcaggtagtatctatttggtatacattgtgggattgagatctccttggatatgaactgcttaatcatcttgaggtcgtttagtatcttcgagtttgtgttttctaggtgtgaaatcttgtccaggaggtccttgttgttcgtcttcagcttatccttttcctggaccatcaacttcttctcgctacgttctctctccagttgtccactcagggttgttatctttgcctgtagctgatacaccttcgactcgtagtccaacatcttcaacctgtcctccttcaactcttcttgcagtatttgattcctctcaatcatagttcctacaacaacatgcaatcgtgtattagtgttatgaaactgtctatcgggaagtaaataaggtgcaaatgagtatggagcagcttgataataaatagaaataaccaagtacctaaataaactagtttaattttacctagtgatttagattcttgatgtaacttcttgagctgatttctcgctaatattgatctccacttaagttgtaactttatggcgcttgccttcaactgcttatagtatcttctctgcaaatacgccttgaagtagctctggatgacagttgcagagttattgacgtatttatctctgacttcaatcctcgcgataatattcctgaaaagactctgaaggcgaacccacttagccaactctgccttgtactcagcccgagctttcatcattctgaacacagactggagtgtaactacagcttctaaacgccttctcctgtactctctaatcttcctgactttgtacttcaagtatatctgaagagttctaatcttgtggaggcactcaagataagctttacgctgcttatatcctctgactgtcttctgaatcactgtggcgcttttattcctcaattcttgcaacgagttaaagagaatctcatatatattattcctacaacagatccatttattatgtaagtagcaacggtgaactaaatatacaactccatagaattaatacttgaagaagatgagggattttccgaacgccagtgacccttgttgatatggattaaatggaatgaaccttgcgaccagaatatccaacagttgcttggtcatcaaagccatatctgaacatatcatcaaggatatggtaatcaggggattaagtaataacttaacagcttaagtgataactcagtagaaagtacctggctggtgtttcgagactctctcagattcggccttactgaggagatatttgaacttgttgtagaagatcaaatgggttaagcgcactgggtatccagctctgctaacttccaccacttgtaacatcccaccacacctaaacaaaaatataccgagtcaaatcaataaataacaaccgatggttaactagtaaattgttattgaacttgtaagatacttgagttgttcgttgactgtattcttttggaagatgtttggcaaatttaactggtttggctttatgcaccgtatgaagtgaggctcagtcttacttattttgttcatcagctgatccagctgcgatgtgaactgggttgatatcgtcttcctctttttcatcagctgtgtcaggttctactcatttttatattaccgatgtgtgttaaagggttaaatgggtaacaggcttaactaagtgcaaatattgttacctggttggatgtgattagtgattcgaaaatggtcttgattttatcatttttaacgttagtgataaagtgaatagagtcatctgatagactatccttgttcttctccaggaagccatcaattttgtacttcactcctccagcaaagtggtttacaacaaaactactttggtcagttctcaccttgtcaaacctcttattccctaatttatgattatatgtgaattattactattgtatgaatagtgaaaataaaaaataccagaatgcttctgacaaagtttattgcacaatgactgatcattaccaccaggtatctgacattcctcatcaatcattgcaaatatcccctgaatgcaatttaatccacatataactagggcaattatttatctagaataaataactgaatgctcacgtttattttcagtttgaacaggtcaatgcagtcttgattatctggaaaatctagtgggttccaggtgatcccttcctttgtgtacagctgctgctcatacttgaacacgcagttattaaagaaattctgcagcgtttcgttagtaaagtttatgcacagctgttcaaaggaattgagctgaaagcactcgaagccgaagatatcaaggattccagttgacacatccactttcgactgcttggggtccactgctgagtttgccactgcaactacaaagtcaaacaaaatgctatacatgttctttgctatagcatctctggtatctatagcttcatctacacgcttcggctttgtgtaaaactcattaatggtcttaatgctgcgggtcaagagaacgttcaaaatatcactttcatcaacttgcaaaagttgggcgatcttagaaatgctgtcctcttgaagatttgacaccacagctccttctgagcagtggacgtttagaacaaactcaatattcgtcaagtgcagtattgtcgcaataattgagaagataaccttcacttggtctaactccaaccctaaggtcttcaaggctctgagattttctttaaaaaactccaaatcataatcttcattcaaattgcctatcggtttacaatttggcactattctgaattccccttcgaagttactcaaatccaggtcccacactgaatcatcatccagtttagaatgttccttgctgttaactgtattatccataaagttaattgagtatctgctcccgtatttacggtatgctgccgtcaattgatggaaaatatgataatttcgttctcccgtttgctgttgtgcaattcttactttttcaagcaaatatgtttgaattgtcgctccaatcagtttcagtctttctgacgattcctgcaggtactggagctcaatatacttcccatatcggctcgagttatgattcctcagtgttgcggcattcccaaagctttccagtagtgggttgctttccaacactttcatctcaacgttttccctcactggtttacttttcaccacatgattacgggctgaatttggcactgactcgtccgaatcaatagttgattgtggagtgcttagataatactggtctacattgaccttattgtgtataaggttagaacacaggtacttaaggacatattttgttgattcggtcttgcctgcccctgactcgccagagatgaggatactctggcaaaacccgtcaagcattccataatacgcatcactagcagtactaaatacatgaggatccttatctccaacgtagtcatattttatcagggtctgcacaaatttaaagcaaattagtttaaagtgtaaaatagtctattaaacaacaaatatttaatgataaaaagtttatacttgattggagtagagatttgggatagttttgaatgggtttactgcgatgaggatttttcctgtaagggagtagatttggtcctttttaaagcgcaggtagagactatgaagaattgaggcctcgtggaggtgagttaacttcgtcaggtcatcaggtacatcatcgttcccataaatatctacaaaacaaatatagaatttatatcaacaagtgtagaagtagattgggatagtaatatataatagtgtatggagatggcataccaactgagtgtggataaaagctgtctgaggtgttaaattccctaatttcaccctcaaaatcccctagaagtctgactgtcacattcttattggttacactttccacgattccctcaagccatatctacacatataaataaatcaatgtccgttttataatagttaagataatctaacacatgtaaggttcgaaataaagtaaaattaagatagaataattatttaatatacgtaaaaacattaattttataagatcaaaacataaataattgtaaaattacttcatctttgcagggaacgaagatatgtgttccaggggttaattttaaagcttcatttgccatttatatttgctattattatactatttgcataattatttacacaatttttgacacaatttattgatcaataaaaaagtgaattctttttataacaagaactagaattatagaaggacgataatttacataataaaaagatttatcaactacaagttaatagaatcagcactatagatgaggatcaagacgtcgcaaacttgattacacatataacttcttacactacaaaataataaaatatattattatatattgaatatatttattatatatgttccatataataattttaaattccccatagaaataaacaaggcccatgtaatgcgttagccgggactcgaacccgggtcccaaccttgggagggttggatcctacccctggactactaacgctcactcgcgaacgtcaatttaaactcttttatatattattataaaaccatatatcatgactaaaatttatagttgatttaaatcttttaattttatgttattattatttaggtgttggaatccaaccacgtatactgatacatggtttatatcatgtattttttccaaaattgttatattatagcataattatcgtgtatattatcatatatgagcctaatatttgagtgtatgtaatttctttgatgtgcggaaaaattttctttgctaataaaaattagatacgattacacattttaaaaaatctgattaaatgttacaaatcaatgtttaaaatattattagatctgtttaattttttactataattgtaattttttgttttaagttctgatcatcagaacacggaatctcattcatcctaaaatttccattttcatccaaacctcatctatcacacctaaattcaataaattataattatacttgtaagattgatcaaaattaggtggaattaaggtaaaataaaattgtgccaattacatgtgtaaaaatatgggaaaggatgtcgactcaattaaataatctttggatgtccagcttatcagcgggatgtgcaaatgacagtcccgctttaagtgaactcttatctgaacatttaaagcgagtttctcttactgattcattaaatttaatatttaagggcggatatttaaggaaatggcgtagatcatctcgtttaaccttatctcatcccaaaaatgacaataaagcacttgttgcatcacacggaagttccactaccgtttacagttcccaatcttctggacgttcacatgagctgttcttttgggtttcaaaggtgtgcgacacacttttccttcgctggcaatcgaaaagaaaacgcagcagcgagagtattttcccgctctgtgctgtaagaagtatacacagaggtgatgagttgacctacttcgatcacaaggatcccttcgacggcgtgagcctgaaatttatcttcgttatcaacgggaagttttcactacagctggcagcatcgtctgagaatgatgcacttatgtggatctcaggcctctatttcgcagccagatatgcacgaagtgaatattcaatcaattggataacaaactcagatgttttcaactcatttctcaagtcagacaagaagaaacgaacaggtaactaaactcatatatacatatatctatataattctatatacaataccatgtgtatgagatgttaaattattttctagaacttggcgactgtgagtttgattcgaaagctttaaagcgttgtcttaacgacaaatacgtcagtcttgtatacttgagtgactatgagaacatcagggctgaggactcagacttcttattaccccaaaacttgtctcagtttgttgaatatttagggtattgtggagtagtttccaggcccgaaaatgttgatgttataacatcaatggtacgcagactccttgagttcagaaataccattaacgccggatttttacagatgacctcacagcttgacaagaatttgaagccaattcgtgtcatcaaggcatgtatggatcactttgattcactagacttggaataccgtgtcctacatagagacctgatagctatttacccagaactcacaaatcaagaatgcgaggacgttttttataatatagtaagacagtgtgctctaagagttatgctgagaacatcaacagggaaatctgagttcattcagcagattcaaccagcagactatgaactatttctgcgtaacattcagtcctctgattctaacgaagtggttacaaatttgcttgcagtacaagactggctgtcccctttatcgtatatagccgataatttgcctgagttaaaggcagttggctgtttcaggaaagttaatattcccagaattcctgtgagattcctgacacttttaggctttaactggtcactcacgagtaattttaacgacatttgcatacctcaagacagtgacgagattttctcagtattgagtttaaccttgagggatttctggatatctagtagtcacaacacctacttgattggagatcaattgggaggttcagccacggccggtgctctagcagaagctcttctccgtggatgcagatgcatagaacttgactgtcaagacggcgctgaagagccggtactttgtcacgcttggaagaactgtcacttgacagggtctgtgacccttcgtgaaggccttatcgcaataaaagagtccgcctttgagtccaataaattacctgtaattttatcctttgaaatgcactgctcagatgaattcaaattccagtcctttgaacttgttactcagatactgggagatgaactgttgactttggacaatgacgaccctgttgacttagttgcccggtgtgagctgggcaatttgctaaacaagttcttgataaaggcaaagtataaatcatctgaaaatgcatttttaggtccaggcgaaattgcttggcaatcgctaataactttgagaggtatagatatagataaagtcgatgaaaaaaaaatcgagacacttaagcgtaactctgttttcgctatttccgaaactaaattcattaaaatatcaaaggaacctagtttattgaatgcgttagctgaacgttgttttgtacgggtttacccatcagcaacaagacttgcaagtactaatttttgccctgtaaagccttggtcacacggagttcaatttgcagccctaaactttcaatctttcgaccggtcaatgctgattaattatggccgtttctaccattcgtttggatatgtaccgaaacttatctacaaaaactcgtcagattatggcggtaattctaaatatgatcatgaaaaggctataaatagtgataagattaataatgatttaatattgactttacatgttttaagtgggtcccagttacctactccaaacgtgttccaggatagaaattacgtcaattcttttaataacgtgttatattcagttggagaggagaatatgtttcttgataaaagtaatttgaaggcgccaaaattcgcaaaatcaaaggagaagcgtaaacttaagcaggcaataaagcaagggttagaagtagatgaggaagatactaatggcaccacattgtttaacgttattgacaaatctgcaagaaccgttttagaccacaggcagaaggtttgcccttttgtcgaagtttcagttgttggtgaggacgaaaacacctgcaagacgaaacctgtaaactttaacaccttcaatcctgtctggtcggactctaatccgccctttactttcaaaattcgtaaccccaatgaggcgattcttctcttttacgtgaagcactatgacagcatttcttctgaagttttaggtcaggctgcttttcccgtcaacaggttacggccaggcatccgctgggttcaattgctggactctaagtttatggaaatcgattgttcaggtttattagtacacattgagatgcaacccttgaaaaatccatgataacgcataattcattcgtgtatattctgcttaaagtaaagataaaatatggataagcttttcgaaaataaaactcaaacttgctttgattaagtgttaattttactaaaatacatttttatacactatatataatatataatatataatatatataatatgtaatacataatgtacaaaagttttatgaaattatttattaggtaccactgcaggcattgagtgcttaaatgataccatcgatagtctgtgtgcaaaatataacaacaaaaacaaaacgattgtgttaaatattaaatttgagtagtaacacttttcataatgtgtttcacttttccaaatattattgtaaatacaatacactggactgcaagtattattatccgaatatcttaagtagaccaacaacttgtatgggacaacattagtatagtctactgatgtaacattattaataaactctttggcataagatttacaagaatcacaaggcaacttgtgcaaatttaacagacaatcagcacaagaggactttttacaatgatagagcatataaagtgtcagtgaaagcactagaatagccagtgaaatacagaaaattcccgcctttttcataaaaacaggatcataaggctcttctttatatgaattaaggtcaaaataattacttggtaaaattttacttagacgatcaaaatcacactcaaattccttcttcggcttctcaacctccggaaattctatttcatccgttctgcgcctatacttctcatatatcttatcaatccacatcttttcctattttataaaaaaaactttaaaaatactaagtgttttagttctggtctgaactgtaatatatttgtaaatagtgaaaaaatcaaaaaatttgaaaaatttgaaaaatttaaaaatctcatcaaataacggaaaataacaacattttagacaataataaaaagaaaaatatttattttattatattatttattgggtgtgaatatgagtgtatccttccatcccaaattttgcagtatttttttcctaaaccgctttatttagttaatttttaccttgtttgacagtagaagttgaaataatgttcatgtgtgccgtctgggtttaaatgtaatataaacggattctcatcagaattataataaaacaacgccgtgtcatttttaacacaatcatttttattattatacaaattatcatctttttcattattttcaggattagttaaggatttaatgcctattggtatgttactggagtctatattcgagtaaagagctgcgatatcaattgtgtaaggaaactgttttacaaaagtttccgagtctttaattgtatttgccacagatttaataataccgacattttcttgactttttgaccacgaaaagtctttatatccctcaactatcttcaaaaagtccttccataccttatcattcatatcactcattcgtaccaacatactcacaacctattacacattgagttagttatataataattattattatttatatagctagatttgttactgttaaaagatgtgtgctgtgattgagtggtctaagttgattaaatcttttaactacttttaacagagtttcattatttaattctaatccaatcgctattaaatcccaaattaaagttgaaacttccaattcattaaacttttgtatatcttcactcactcgtttgcatatcactgatagcaattccttattctcaaccctcccaagtatgctcatatactcaatcaacctcaataaatgattgttctcaaaaatattactctgcccaactgtattttttattgtgttgagtataacttgttctacttctttagttttaacttgtattgttattaagccacttaacaaatccatcaattcatccaattccaactcagaactaccgctaataccgataatatattgtaatataaatttatagaactgttttgaatcctctatatccattgaaattccctttgataaaaccattattggtacaatttctgacactgagcattcctttacctcatccaactttgaaattaatattcgaaataacctcctctcaaacatgcccagcaccatactacttctaatcactcattattactattgcactagtatactactaaatacactatattaactatataatattgattggttacttggatatttgtaaaatatgtttaagatgaagccaatttgggaaagattctaatagtgtcaatagttgataatacagtccatattgaggtacttttgctatacttaatgcttcaaacattctacatatcaactttggatccctaaagtacatcactctcttctccaaatattgagacagtttattatacaaagatacgtctacaacatatttgaagtattaacaatagtattctaatgtaacagtaaatgagtaataatatatactagagtaataatggagtagtactttgtatgtttagagaaccacatgtaataagtgcttctgctataagttctggaggccaattaaatgctaaagtagatggtatattcctaattaatcttccatatgttaacccatcacccaaccccaaattccccaatacctataaaattattaccactatacataatattcttgtataaatttggtatacaactatatagcggatactatgagggttttgattgtataaccatatttgagagtatataagtatttccatatttctgaagagaatctcggtaatatttctgacttgattccgtatatgtaatacatctctgctacatcaattaagttatagtatgtgaattgatgcaaacaatatggcaatttcttgtccaaaaatttaataaatttactatttctaatgttccaacccttcaaaacctctctctccctatcctcggttatacttgtagagtaatcaactttaactttatagtcataacttcttctatttagtaatctactcacataactataaggcaatttctttacacatttaaactcaccatcattacaactgtttacatagttattaaaattatttacggatttattactactagttattgtgctaatatgtgtcataattggtttcttttgtatatatggtcgtttggataagtaacggcaaaaatttccaaactggtcctgagtgaaattatcgaaatatttacacaaaactctactataaaactctgtaaaatccctatcaaacaatgccatacgatcaaatactaacaataatttatcaaaatcattctgggcaacctttattttacctgaaactattaaatttactgcccttttatatatatcacaaaatgtttcagaatcttgtgaatatcctacacataatctcacatatgactcaatcaagggtattacattgtgcctattaatttcaaactgttccgactccaaaatgttaaacaatttcttaaataaaccaatattacttatttttaacccatttttcactaaagtgtgtgaatcattattaatgtaaactagtgagtttactacttttgaatatgatacaagaaatttaaacaaggaatccgctgaaatatatgaaactacatcatccactttatgaattaactgagttagtagttgatttgtgttttttttaccgaaattactcgggcttgacaattgttgtaatcttacacatatttcttccaaatgtgcatttattcctttttttaactcgtttattacatttttatctaatattaattaattgaattggttagtttttacctgaaatagtcgttatttgtgttgtgttaatacagtatttaaatgacttaaatgagtttaaaaacagtttaaaatgcgcatttggtttattatttttccatttgcgatatgtattcctactactaatctcccatggcggtatttgccgccttagaatcatcctctatcaagattccatgtactattaacacaattttaatataatataatgtaattgtttaaaatattataatctcgcgtgagttcggtttttaataatattttttctgaaagtgttcaacaggtgtttgtgtttattacccaatcccaatggcattatcacagatccaatctttaccaatttctacaaacagaaataaaattgtgttattatactaattatcccactattttacgataattttgtatagttatatagatgtgtagaaaaatactttgggtttaatgagtttttgatgcatattaatagtattccattcgggcccaatcggtatttccatattagaattatattcatgacgattagtataaggatgttccaactacaatgatattacactattattgtaatacaattatttgatgagtatgtaactgaataaaacatactttgtgtatgtagtatttcgctagtttgggatcttttttagtatttatttgaactttagttctctttttcaccttaatctcatcctttttctcaacatcgttagatttattatcagtattaatgataccgtgaccagtccatgaaccccaacctgccatattagttactttctttttctcttcttcatcctcttcgtcttctaaataatcctcttcatctggtcttgtaatgaacatttgcttcacatattctctattcttttcattctcatccacattcaattcatttatctacacattaattataggattttacactacttaccaaattatcaagttcattatcttttcctaatctttccacacacttatctttattcagttccttgggagtactctttacagccttttctttattggacttatctttattcacatttttatcaacttttttagtgtcattaggtttacttttttcaagatgtaactccatggcattcacagcttcatcagatgtgttactggtattaataaatgagttgaaatctcctcgagtatatccgactgatctgaccatttcactggtcttatcttgatcaaaatttaatagttcagactgatcattagaatgaattccaatcacttcctcttccatctctttactacacatctcatctaattcagtggattcttgatccttatcctttttaagggtattgagtttggtaatttgttcatccacttctacaccttcattatttactaatatgttataatccaattcatcatctgatttatcttctgggtgttcctgttctgcgtctgaaacactatcaccttcatcatcactttcattattgttaagttgttctctttgattttgtatagcatttttcatgaatgttaaattaaataatcccttatttggtattggcactaaacaattattattacaaattattaactcgatactatgactatataatattatattgttacctgtggaatctaaaataacgtttaatttactattaacatcatctacatcatcttctacaacactgtcctcttcatcatcactatctttctcttgatcagaattttcatgacctaatttaacagtttggtctattaaatcataatgttgttttaaatcattctgttgtgatgttatcagtggtaggagttcttttccaccatatcttaaagccattttggcccatttgctctgcgcttctttcttcctcaaaatcctcttttcagctcttttacgctcaaatgtattcttaatctcagttgcaagttcgggatcatcaattttacccagaagcttagcagccatctgtaagtctctttgtttctgcctcttatgccatctcttactcttaattcgattaatacgtttattcttcttctgctctctggcaattatcgctcttactagtgctgtattgtccatcttagtttctagttcatttcctacactgtttagttccttctcaagctcagtttcaggagtaaatttagtacaaattgtactaactgtgggctctgaacgagaatctgatccatagactatagtttcacttttcctaatttctctaactattggtgcccatttcttcgttaaaaagcgtttcgttgactcatattgagctcttctctcaattctcttcagtctcgactgggattcggcagttagtatttgaggtacgtctttatcaatttgcttgaatttcttcaccaaagccttgtattgctcctttgactcctttgatttcgtaatccagtcatatgaagaacttaattcctcaacctggtcaaaatcaagtaaattacctgagatatcaacactatcctctaatctttcatatgaaactccatttttttcatccttttcaatatcttctgaagcgtttatgttttctgcatttgaagaatcttgagaatgaattaaatcttgattagaatcttcactatcggactgattatcataaatataatgccacaattcatcgcattccccctttttattctttttaccactttttacgccattaatattatttaaagtattaatagatggagaatcatcgatatttatatcatcttctgatatttcttcatcgtagtcagagaacttggcatttttgggctttgagtgaggttttgccttagaagacttggatttcttgacctttttcatttaaatccgacttataataaattatcgagttggtttcacgaatcaaatggactactattatgtacatgaaattaattttatttacgaagttagatcttaatgaaaaattattaaaatagttatgaaaatgataaactgaatcaaattatattaaaatgaataaaaaatgaaaataatacaaaatagatttatgggataataaaactccaaaatagcatactatactagaagaaataggtattttataaaacaggtttatttgggggataattaattttataaaaaagttatgaattaaaagggtaatttgtgtattttgtgaaatttataataattgttattggattacacaaaaatggtgtaaaatttaaaactagctgataattattagatttttaaagaataaaaaaattttacagggcggggaaatttataactttagtagtttaagtaataattgttgtttgtgtactatgatgttatttaacactatattagataagccttataaatagtgaaagggaggctatttcccatgatttagcctcatttatttgtagattttagtgtaaattattctctgagatgggaaggaggaacaaagcacttttttgattttttttaccgtcatgaataatcttactcaaaacaacaacaattctaatcaatttaaagataattcttgccaattagttaataatcctgaaaagtctaataccactgttaaggattgtactatagttggcaagactcagaaacgacacccttcaattggttctaagtcaaggtctggtgaccacaaacccaagaactcttcacaggctaaatctagggaaagtgacccctccgcagtcattaaggctattggatcatacgtccagtgcaatatttgtactaaactctgttctcggaatggtcatatcaaatgcgccgagtgtatcgatttcaatatttgtctaaaatgcttttgctcagggctagaacgccctgacgatgaagtgcttgccagctcttttgttaatgtttcttctaaagatcatgaagaacaccataatacccataaatacatacccgtcggaccttccaactttgcacttttttccagaggtatttttttaatttttatgtagtttgacgattttttattttatttcttagtatattaggctatatagtaataaaatgtgtattagattggtcagcggagcaggagttattacttgtggatgcaattgccaagtatggacttggtaattggacggtatcttaactctatactcatatacattaaataattactcataatattattataggaagtatctaatatggtgacaatgtcccattctggatataaaactgaagaggaatgtgaaacccactattatcaatattatctcaactcacctacaggaccccttccagtattttttacacatatattaattgataatcaggacacatcgaatttggtatatggtgatgacggaaaacctttaatggtaccttttcgaggacccagaccacttcaagataaacctaaaccaggtactaacacaaaattattagttatataattgattattaaaacacattatgaatatataataacttgtagtaacgagtaataaaccacaaactaaacctcaaataattggatattggcctctgaggggggattttgatatagaatatgacaatgacgctgaacttatcctagcagatatggaattcagacctgatgatacgcccgaacaaatagaacttaaacttaacgttattgaaatttacaactctaaacttgatgaacgcatttatcgcaaaaaaattattatagaacggtatctacaccctactataacttatagtattatactaacattaactatgtaactatacaccactgtaatattgctttagcggattgttggatactaaatcgttacagcagaaggaacggaagtatacaacagaggagaaggagttgtataatttattccgcccatttttacgtttccaaaccccagaggaacacgaccatacaatccaacttattgtaaaggaacgaaaattaagatcaagactttatcaacttatggtctggagaactttaggactagaaactgctgatgatattaaggtacacaatatgttatagtagtatccatagttagtattatatatcatactagtacagtaatataatgattgtgtagaaatatgaagataaattacagagaattgagttttttaaagatgctctggaaaaacaggattcagatccttccagaagacatgaaagaagattaagagcttcaaataatgaaactgaagtatcccgttacccactttatcttagttatataattttagttatttatccttaatcacactttaaatttacaatttttaggtaaatatgaataatgcgaatagaataaggttatcagattttattgatgagaatgaaattgagttttgtgagtcgttacacctgccaccaatagcatattttttggcaaagagagttttattgcaagaattagcatcaaacaacatttattcagtggacgatatgtgtaatgaacttagaattgatgggaccaaacagggtagaatatttgactttttgttaatgctatcgccgaaggcgttaagaaatatggaacaagacgtagcagatcttacgaaggtaaagttggataaaaacggcttagtcgacacctcaaatgtggctgctcaaatcacggttgatacgtcaacttctttagaactccttaagaaattatcgacacctacaaataaggagctggaacccgagccaaaatcacctcacagtaataaatccagtaaatcctcaacacccagtgaaaaaaatctaaaaaaacaaaaactacaataactcttttaatgttttatcaaactattatttatagtgtttttatgcaaattttacataatttgttacattttaaggggtaaattaatgataatttatcccaatattgaatcataacgtttcatatcattactttaaattaatgttaaaaatgatgaatttaaggagaaaatataatagttacagcgattctggaatttattctgaggattcttacctatcggattttaattcaagggataagtttaacggtggaatcttggactccgatttaggctcacttttgcccggaaatagagtaaattcttatggatacgatttagctaaactccagaaaagtgatttttataaaatttctgcaaaaactcctggagagtatcgcaaacttgatttaatgtatagattttacaggatttgcaataatcttaaaattcaaaaccctgataaaatttataacatgtacttgaaaagacttaataagagaattcgtctagaatcttcaaacaggaaacttgaaattataatttcggctctttactacattgaccagtgccttgaaagaggtaataattacactttgagggacattttacttagaatcccagaatgtaaagtgaatttaaaacgtttcacccgtttcgtatcaaaattggcttctgaacttggcattagtagacttccagttattgatgacactctcttaattagtaatattttagatcaaattcgaatttattgttctgaccacattacaactaatgggaaagataacccgcaaaccacaactaccgtaattaacattaacgaattatttgatttggaggatatcatgtcatcactaacttcatctacaacggatacttcaaattcatccccaacttcaatgtacgctcctaattcatcccaaaattcacaggacactatactacatcatacccctattaagcatgacaacattctggataatgatgctaacaagggaattaactccgaaaactctgaaaacacaccactcacacctaataactctgatgctaaggacaaatcccctaatagctccaatatagctaatgacacaacacgttacaggcagatttctaagttaatatcactgaatcatgtgaaattagtaaagttatctggaaggatattagcattggtagacgagaccaacgccaaggagaatgtcctaaaccctcagaatagagtaatttttgcctgtaggaaaactttaatagcttgtgtaatttatctggcatttaatgctttaaagatcccagttactccaaaccttattatcaaagccttaaacgttgttaggtcttccttttaccgtaattatagcaaggttaccagtagaattatggccattttcactagcaaatttaactgtaaaattaatgataaaggcaacttgatgtcactattacatgttttgctcaccaataacactgactctatcactattaccagcagtaacactagtaacaccactaattccgacttgaacagtgttattcccaagattgttaagatagaaaatatatttaacgttaataaagataaagctgataagaaactatcattttccaagaccgttacttgtcttgatatcttaactaatgtccataacactaacggcactaaggaaaaaggagtaataatatatgaaaggtctgcaaataggtatgtttgcaggtataaaatcaagggtaaaataaaacggaaatgcttctcagttagttgtcacggacaaaaaactgcatatgagcttgcaattgcattttctaaccacatttctaatctaaaataaaggataatataataccatacagtaaataaactagtatacagtacagtaaactactgcacagcaaaataaatgtactaaaaatatatattatttggtaataaaatcaaagggtaaatctttcggtttacattttagtggttggactttaaaatattcgtgttccaacgcctaaaataatcgtgaacaagtttacaaattacctttttagcactaattctctcattagggtttaattttaacaactgtgataataaatccaatgttacactattagcatctaaacattaaattaatacttattggtaaatttaagactaaattagacctatgtaagactaaagaactgaaactaagttaaaaatacgtggaaaaagtgttgaaagatctttaggtttagaaaacgagtattgtgtgtagagagggagtttagtgacttctggccacgtgggttcaggagtgcctaagatgttatagattttccccagttggtcaatctcattagtgcctgggaacaaaggcttcccggaaagcagttctgcgaagatgcacccaacactccagagatcacatgcaaagtggtaacactctgctcccatgagaagttctggtgctctgtaccaaagtgtaaccacctttgacgtcattctttcccttgaggcgttaagttccatagtctctaaatccgtgcattccctgaaaattggcggattcacagttcttctggcgagaccgaaatcagctattttacacactccgaaattgtcaataaaaatatttgcaggtgaaaggtctcgatgtgcaaatgaagaagagtgaagcactgataacccagttaaaatctgtgacattatgcacttcacattaggctcagttagtcttattttggcgtctacaaccttcttcaaatcagaagccataacgtccattacaatgttaatgaaactctccttcacgtatacagcaaccagacccatcaagttctcgtgacttaattcagtcatcactttcagctcacgcagagttgtaaagtggataccgaccatccctaccaactgccgatcctttgtcactcccttcttatactctatattcttaaccttctttatagcgaccattctacacatatgtgaaataggtaaaattaactatcattaatgtaaattatatgtgaaatatgtgcaatttaagggtaaattagaggaaaattaatggtaaaataaggatagaaaatactttccagtgagagtgtccatagctttaataacttgaccataagtgccttcaccaagatgttttcctacaggagtaaatctcttatcaagtgattctgattcgttggaatccgttacggaatcttcttttttatcctcaattttatcatcaaactctacctttacagttttttcagcattttccacattttttccatcttctagatccttattgttatttaaattttgtgaatcttccgtttttatcccctcatttggctgttctttgtgttttacaccttctttaacctttttacttttttcaccctttgcggctgatttttttacctttttaaccataaaatcatatgcatataactataatacagtgatagataataattatttgcgttcgggttaaattatattgtgtggtacaaagtaccaattgataattttaaaacagttttaataccaatttatgcccaaatttgtaaacaagtcttataggaattttattagtctaatctcgcttattggtttaacctgtgtcttcatcaaatatcgcattaatatgacaaggaaggatgccatcgtaataacgctataatacatctttagactcatttcttagcgtaaagtaattatttgtttttaggaacgatttgcagcaatggaaggcgggaagaactttactattgattcacttagttttgctcccaaagttgaatattctgactctaaagatttgaactccaaggccaaagcgcttttaaacaactatattaaagctgacagacttttacaccttactagaaagtctaaaaaagactaaaaatcccagttctaacctcctctgacacctaactcagtaatatattattactaaccattaatgttatattaccgagtaatacactaatgttactgtaaatttaatttagtcgttaaatttagttaatggtgagcataaatcgtgtgcggaatataaaggtcccgtgttcccatttatttccttgagtatttttctgagaaagttgtgttaaactataccttaccttccaagtactaaatactgtaatattatctttaggcttgataaattcgctccatcttcatctaaaagttgtttatttaaagattgaaaagtacttaggatggtgtcgttgactacgattgccgtttcaagtcttctgtctttacttaaatttgccttcaaaggactattttcaaagtcatcatatgccaataacccacatgcctcctaatcgcacatattattttcaggttatatatagtactacaataatactgagttatgggtgaaataaagccaacacaactagtatagtcttacttggaagacatgtttgaaatgatcatttttgaagagttcttcgaaatcatcattatctgcgagttttttaatgttttcttgtagccatgagaggcattctttagtgtttctaccattcttgagcatctcaataaagttctgagtcaccagcattacgtaggccattgatgacttcttgatcttggggaaatttctggaaaaagcctctagtgctccctcaatttcaccattcaaaattccgtcaatcaacactagaaaccagttaagcgtgtgtaaagttacctgatcttttttccagagttgattccattttatttaccacttcatttgatatgtaaagttgatttataaacttgttttcacttttatcttcattcaaatccaaattcattccgtctacaacattagtaacactgtggtgattacctgcgttagtttcatttttaaaggcttttagggtctttgagtatcctctatgaagtaaataaaagtgtactattccattcaggtcttctcttgatacagtattggaatttatttcatccctctccgttgatattattttctaatacattatacaacaattaaattcatcaataatgtaataaagtaataaggtgctaaatgagtgaaaaatactttatagtaatcttcaatattgaacttaaatggtccaagaaagttaaattttacagattctccaaacgagtttaaaccaacagtaggataattgtctatgtgaaacaaactcccggcactccctaatcatagattaacacgatttgttactgtaaggcataatatctgggtatatagtgttgggagtacctaggaatgatccgtttttggtgaagaagtaattttggttgaggtaattaattccacagccaataacatcgcctttaccatatgaagggccataactctcagactttgaagttccattcatggaataaccatcctcagatttatatcccaccgaactaatataatatttatatatcatgttatagatatattatttagatgtgtagaagggtacttgggttctgatcctggatgtcgattaagatgataattactgtatgagaatccaacgactattttaggttgactgtcacatttcacaatctcgacttcataataatacaaagggcagtttgtaggagcacatgtatcagattgtacagactaaacaaagataatatatgtattaacaaacccctgaatcacaatatctgctctttccagtatattctacagttaaaagatcctttaaaattgttatataatgttgcctgattctactatttaaacaagaaggtattttagagaaaccgtacaatttctcagtcaaagtctttgtcattttaaccgtaaaataataataatatcattgtaagataaaaataataaaataaaataatttgtaacaataatgttataagtttgtacctcacataaattaattttaactaatattttcctttatcttctttgtcatatttttgttaatttttattttatttttatttctaacccacaaaatataatttatatttgtattttcatctaaacactttcttatttcactgtacaccgtagtcaagtgtttattttctatttcattcacccataccaataaacaaacaatactatttatacccacttgtaatgttattgttttaattgtattctaatttttcttgaattggtaatttcataaaatgggaaagaagaacgaatttaaaaagtctgaactgatccagatgttaaactcctcatcaacactaagagaaaaaaacaaagcggtaaaattgctgaaaaaatttgaccctaatcccagaaaacacttggattcatcatttcaaccaaatcaagcaactgttaccaaatactcatcactccaatcgttcatgttcgcacttgccatacatttatttattgtattgtagtgtagtatcactggtttgtcatattatatttttaggtgctggaggtgtgataagataaagcagacaatgacaaaggtcaaatgggaaactaaagaaggtaattactaacaattatatacacaaatagttatacaattaatgtgtaaataagagtgaataatgtgtaaatttataggattgaagataatctgtacgacgtgctacacaaacttggcgacgtatttggaagtggccagagttcgcaatttaaacatcaatttcaggtcataaaaattccaatttgccgatttttaccaaattactttttttaaattttttgtcattcatttaccttccaactattacactggggttaaaaattcttcataacatcattttttaaaaacagtatatatatttaaatcatcaccttttgtttatatataaagtattatctttatatatatgttgttgtaaaaatgtaaaatgttgtaatctttaattagcattttaataatatattttaagactattttaatttttcactctaaattttgtaaattatcctctgttcattataaaatatttaataacgatggcaacgtatcacgagaactatattaacaatccacttgtcaaagcgctcatgactggcactctcttagaacttaaagaagttctaaataatagatatcaacagtataaaaaccacaataaaatcgattcttctacaaacaacgaagattctgtacaatctaatctaaaatctgacgcaaatgacccaaattttgaaccaaaagatgatttaaaagattccaaagctggcctaaatgataatttgaatgtggtagagaagaccattgaagagttggtggatgggaacacaagaataacacctttatgccagttatcacataaaacaaacgaagaaagtttggaaatagcgaagctattggtggaggattacctgctttgtaatccgaatcacgtggatttgattggccaaacatgtttgttttactctgccagggatggaaggggcgaactttgttcatatttctgtaaaaaaggctgtgaccctaatcataaagatagattagggcaaacttgtgttttttatgccgctagagatgggcattcagaagtcataaaggtactagtagagcacggcgcagatgtaaatgtcactgacgctaatagtcaaacctgtttattttacgcggccagagacggtagagttgaagctgtcaaggttctacttgagaaaaacattaatcacggctggaaggatttgcagagaagaactgcactttcatttgctaaatccaaaggacataatgaaatcgttaaccttttaaagaagtcaacacctgaaaaacaaacttcaactccccaaaaacggacattagaatcagagcaatcggtacaccttttttacactatacactctatatagttaataattatatatatatatactattattgttcattattaattgtatattagggaacatttgagggtgacccgtttagtggagtaccgatggtgactggtgacgtgtttagtaataagcctaagagatataggttacagtacagaccatttgcagaagacgataagttatggcttgatgctcctttaataaaggtccaggagtttgagttaaggtttcccgaccttgcgaagtgggataaggaggcggccttcccaccaagtaacacacttagaaatccattactaaagcaatggtattccctggcgcagaatttgctaagtacactttttaaacaggacggagggtacgtgttcgagaaaccagttgatgcaaagaaacaaaactgtccagactactatgacatcattaagaagccaatgtcattcagctgcattagaggaaaactgagaaagaacacctacactgaccctcaacagtttatagatgacgttctgctcatctttgacaattgctcaaagtacaataagcctgaaacttggatagcgaccgttggtaacaggctcagggatttcttcaaaaaccaactcttgacattgggattcaacgagttttgtaagaaggaacaacttgtaaaacaactcctagaacagtcctctcaatacttaaaaagtcaaaataagaccgctgattctaccaacgtagatgctactaatggtgttaatggtaccaaccctactgctggtgttaatgtgagtaatggagttcaagaaaaactgaaagatttatcaaatgcaaacatatcagagcctttaaaaacaagtgaagagcagaaaccgctcgatgttaaggctgaaaatgtccaggaaattgaattttaataagctatacacacatatacagtatataatatacatagtatatagtatatagtatatattactgagaggttatttgttgagaaagagttcatttagttgtttaattgtatcatgataattgagtactttatgtccaataacgcgagggtcaacaaaaatctcataatcattaccaccctaaaattaaacataatctaagtggaaaatacggggtccgtcatatcaccgaagaagtgtatagttttatatccatccaaaaattgaagacaaaacgtcttgctccagccctaataatattttaatcaagtaaaaaagtataaatcaagtattgaaaatgtattaactaattattaggaaacctcggggaaaacatcaactgagattttaccaccaacagaaaagtgtaatttaggctcactattcataaatctaagaataataatacaatgagaataattcaatgagtaattaaacctttgagtgagatcttgacacattttaagtcgaactttttcgacacagtcgtattcgtaaaactcatgacgctcaggttctgagcagttacgaccgataggagaaatattaataattgagttccttaactcaataaaacaacccctaaacagattatttatgggttaacattacctttttttcgggatatccaactttgaaatgtataccaaaacataattaaccaaatccttatagagagaatcaggtaaaaaattgacaatagactaaaataataaaaaattaataataaaagaacctctgaatggactaattcgccatttttatatacttgagtgccgttttcgcagaaaagaaaatcaaaatttttagaaactgaagtcattataaatgtgttaaactaacactcggggttcagctgagatgcaacttttttgaagtctgaaccagagactagagcaatgcgataacctttttctttacacattagtaaatagcttttcatttcgtcagatacaggctaaaaattatattataataagtacgaattactttaaaggagagagctaaagtttcatccaaatcaaacaataaaacaatggaatcattctccattataatttaacaaattattttctagtttatcttgacaatttacaacaattatttcatttgtagtgacctgatacataggtacttaaaataagtaaattattatgaaatgctgagagttaatcactcagtagtagatcttataaagttattatatgatgatttcaatggaaggttagatatactttttaattttattcaaaaattcttaatttaggccactccatttgtgtacacaatttggtctctatttcgaacttgtttattctgaagataatttgctccaatttgcaaatttagtctataatgaattatgtttgttaaatgggcttgaatttgaaaatttaagttctttggaggatttaaaacagttttcatattccaaaggtaattagatttctttaaatcattttatttttagggttattacctgaatcgaaactggaaaatgaagtttttttaggtatcttcaaaattacttaatttcccttagaagagtcacttgttcttctgtgttccgcaagattaagagtaaaaaaaaggcttttcaaaagtttaaatttatatcaaaaccaacaggtttgctatagtattaatagttttttgtttagaatgttattgatgattctctatcatctaaattaagggatttaaagatttctaataccaattacacacctgaaccagtaataactaacataacacatttgtacaatttaggaaaaaagtggtaaaagacagttaaagaatgtgttggatgaatcccaacttgaagaattaagtaaaatatctgatgaattatctaaagattattttttaagatggaactcatatttggacagattctacaatttacttgacgtattctttaaagttaaaggcttcaaagtactttttacattatattgtaacattcattaggattcaagagattttcaagtgttaatggaaactttaaaggaatggagaaaaacaactgaattccgacaactaaacctatatgatatctgcacatatcacaagtaatcaaaagtatatacgtaatcatttcttagggatgaaacaaatgtagttaaaatatcaaataaaacagatcaatcaaatagaatgtcagagttatatgataaaatcaaatcaaaaatttaaattatatttttaataaattcctaattcatattttacactgatttacacgtaatttatttattattaatgtttatccttttggaatatttagaaattattaatttggtaaaaattttaaagtttaacattaaacaaattctttatttacattcctgtgtccccagctactaacaactgaatattaataaaaacaatcttataaaataactttgttacgttatgaaaattttattttagttatattttattattaattactgaatattacctgaaatgactgggaatttaaggcctcgtcgtgcttatcataacgctttcggtgacgaagtccaggatactcaaaacaaacaacaatttcccactcaaggtatgatgcaatcattatttactaaataaaataattatttaaacgatggaattattatttttttaggacgtgaggtgtttaccaatccaactcaatctcataacattccattccagaatcaaggttcattccataattttcctgctcaaaattcatttacaaataccgggaacagttttgtaccaactgatgatggaaaaggtaatttgaatcccagaccttttaatactgttcctaacgttgtttcatctcccttttcacaaaatcaacctactaatattcctgcctctccattccgaaccacctctgtcccaacgcaaagttttaaccctaacgctattccaacacagacctttaatcagaacaccattccaacacagagctttaactataaccctaatttcaatgctaatgtaacaacaagtttaaaccctaatacaaacgtgttgaatcaatcgcaatcattagaagatcgatcaaagatgtacttagaaggacaattttctccgaatactactaccaagactgtatttcctaaaactaccactacactaccattctctcaaagtgctactacacaacaaccgtttgcccaaactaccactacacgacagtttcctcaaaatggtcctgctaactctaacccattaagaccaaacatcactaataccaacctggctaacaatgtgttttcaccatttcaagcacagttaggagcccagttgactaagtttggcgagatgtatactcagagattacagcagtctgaggaagaagacgtggttgatcctccactactagatgagcttggaattaacgtagtggagatttatgagcatttgctaagcgtagtgttacctaagaaaggaaacagtttatttttaaattacaatgatttgtctggaccactattaatttttgtcacctttgctctcgggttaatgttttctgggaagatttgcttcagcataatttacgtgctctcagttttctgtaacctcggcatttacctgctctttaactttcttaatgaacagtacattagtctttcgaaaaccgttaccatcatgggatactcgctactaccgctctgtttaacacctgtgatttggcttttctcaagatttctaaaattcctttcagtaatcttagtttactcatgtgttgtttggagtactgtctctgccacatatctctttcaagctgtaagttattactagttattgattttttaggagttgaatttaggttcaaggttttactttgtagtgtatcccattctactctattataccacttttgctaacattgttatcttctaatcttcattccatattaatgtattactacaatatattttgtggtattagtataataaaattaatacgacaatagaataatagcgttagtgttatgagattatagagtggcattcgagactttaatagatgatagtatgaagccacaacaaggtctatatttcccaattataggatgggtacacattggcttgacctaaataacataattgaacggattaacaaattacttgatattctctaatgaaggtttcatctaattttacattaatgtattcagaggacttggttaacactgagtaacaatgtgataagggttgaaaatgttgaccaaaaataataaatctaccatctacaaattgactgttttagtgtttggttaccattttttaagaacttattggcgatttccattaatgaaattgtgtaagtatcaacaagtgaattatctttattacatttattgaaggatacatttccaattacgacatctacatcttgaagatcagactctgttatctttgttagtgggtaaattcctggcaaagtttctttcttcctctttttactcttcaattccacaacttcttcagtactattagatgatccgtcatctgaatccacctcatcattaccaacgatatccaaagtgcttgttttgagttgtactgtggcaccattgcaaaatgtcataacttcgttgaaatcaatggaaagaatattatcaaaattgttaacaccaagttcatgcacaattttatccgaaactcctctagtaactagccgatatattttacccgtgcctaacgcaatattaacacagcactaatatggtaacagagtaatagtttattagggcaattgggtaagaagtaccttgaagtctttgagcgatagcaccagtgattattccaagtgagtgatcaaacacaacaattctatcatcaaactggacattcgacatgtgtaacatcatagccaaagattcaaatctcatatacctaaagttaattagttatgagtcagatgttatacacataatgttaaactcagttgttacccaattttatgaggaaatccattgaaataactttcacaaattgacattaaattacaatgaccaacttcaaatagtttcagatgcctgaacattatcaactgtttagaattataataattaattgtgacttaaataatagagatgagaattaggtaataaagttgtaagtcgtattacctgaactctttacgtttaatgtatttctctttagaaatttggtttctcgcttgaaaagtttcagaattttggactattttactaatcaattcggacggatttatatctacaaattattactataaatttgggtaataataccttttttcaacttgtttatatcatctgcagagagtttttgagatgagtttaaatccagaaaggtgcgattgtcactggaaatcggcgattctaaagcatcagaatcgtcaaaatcttgttctagtaagttccagtagcccttataagtctcatcgtttctattaactttaatccattcattattgactttggtgaaaatttgaccataatttaatccaatcaaagtgtcaactttaaacttatccttgcatatttttattaacctaatcattattatggttgtattaactaagaattatacttgtttcgttcaacttttacgacgaaacatcttttaatgtgatctattaaaagaacatgatcattctcgcaaattggcctagaaggatcatatgaataacgattaatcattttttaaaaattaaattcatatattacaaataaactacatttaacaatattattacaacagattatgtaaactgctttagtattgtatggcacaataatataataatttagggttaaaaatttacacatttaataaattcatttaaaaccaatgtattccaaattaataaatgtggattcctgataaatggtaaaaatttaacacattgaaaagaatctacagggataagattatgatttcattcgtttagaagagcgtcgttgcattttaatatcttttttcatttgatcaagtttagaaactggaagataatctcgtttcttaaattctggtaaaagttccctggtgaccctaatgcccatagcatttgcagtaccgataatacgcttacaaatcacataaaggggcgttccaattaattgaggatccatacatttacatttagcaatgtgataaacctgaaattaagttaaattaggtaaaatttgtacctcttttagagttacatttccaacaatctcatgcttaggattagaacttcccatcggaacccttgcgattcttctcagaaaccactgagaactcggtgttctcagcgagaatttatatgaactaatcaataaattagttgataaattaatttgtaaattagtggataataacttacttgtcatgatgtgttgttattagaacttgaactggcacatttggcctaatttccttagttctctcattaaactttttacaaaattcagccatatttatacctaaaggacccaaagtttgacctatagatggcgaaggcttagctacagctgcaggtactattaacctgaatcttcctatttgcatttcaacttatatttttttatattacaaatcattcatttaattttttattatcatttctaacgttttatgaacgtaaattaataattttataatttaagattcaacgttgtgtaaactcatttttcaacttttaataaatttatttttaaaattctgtaaatgtactcttaatattgtgtaaactgaatttaaaaatttaaaataattataaaaatataatattatgtttaagaatatagtactatgtttaaatgtgttacattataaccctatttaaatataggaatagaactaatttgataaaattcaatggatttaaaattactttgaaatgtataataacaaatgtgaattgattattcgatagatggcggatgagcaatgtgtagtgatagacaacggttcattttcgctgaaaataggcttatctggcagttacagcccttctttcatagttcattcagttgtaggaaacccaagacccaagtataaacacaactttactgaagatttttactacgctgaagatgtgtattctagccttgagtttatgtccttggatcacttgattgatcatggacacatttcagactttgataagatggaaggactttggcagtattgtttcactcgacttgaggttcattcagattgcagaccagtgctgttaacagaagctccttttactagtcctaagcacaggataaaatcttctgaaatattctttgagcgttttaacgtcgatgatttgaacatttcagtggctggtttactttcaatgtatggcttagggaagctaactggcactgtagtagaagttggtgatggtgtaactcaggttttgcctgtaattgaaggttactccgagcgttcatcaattaagagggtggatttcggtggcattgaacttacaatgtacttacaaaagatgctatgtactagaggatactgtttaacttcaaggcctgactttgaacttgtacgtgaacttaaggaaaaatattgtttttgctcattagatccctttactgatgagaatagaagtgatttagttgaagtatatgagttacctgacggcaaagtcttaagggacggggaaactaacgatatagatttatcattggagcgattttatgtttgtgaacctcttttcaacccctcaattgtcaatattgatgctccaagtattgttactactatttggaacgccattacttctagtccaattcaagaccgtaccacgctcactgatagtatatttgtttgtggaggtacaagtttatttcccaactttgagaagcgacttcagatggagttacaggacattgctccgccaggcggtaggagtaaagttagagttactgctccccaggatcgagatacactagcctggcgtggcgggtccatactctcagagcccaaacttaaggacattagtgctaacatgtgggtctcaagatatgaatgggatgaatctggccctgaaattatattacgcaaatttggtctcgacaattaatataaaaaatacttttttaataccgtaatgttttaataatatactatatataccatgtgtgtgtatagtgtttgcagtataaaattatttatgagatgcgattgaagaagctttagaggatttgtatttacgagctgagtaagcatctctgagttgaacatctacgttcttagtgtgtttagcaattagtctctggacaattaaaggtgttttcggcgtaaaaggagtgcctggcaccataggtgttttgggtgttttcaacttcttatataacttatttgcgatttcttccctctctaaaggcttcggcatattaaactccttcccatccttcaaactcttatcacttttaataatattcttaacagtgtcatctgaaaaattcggatcatctgaacccactagaggagttggtggaatagattctatactcgaaattgtaccccaagtgaatataggctcagcttcacctgcgataatctttggtgtaaacacgtatgaactgtagtatttactgtttttgaccagttctttattcttagaaacaccttcggcggctagcaactcagatagcttctcgtcagctattcgttgtttattctcttccgttttctttgtatgcatttctttcattctttccatttccttctcgtcaatgtttaagttagtattttgactcatgatttcacacggtttttgttccggaatactcaattctggagtaaagtatagtgaatttctagcctcaaatttgttatgctgtgtgtaatgtgcccttattcccaagttagttttcttctgaatatcagaaatagctagattatgtttatactcagcatcttctatccacttcatcttgtttatctttgattctatatccttttccattaaccggtcaaaactccgattatcttctgatgagaaaatcctgttaaactcatcaagtttaagcccatccctacctaaatttaccattatattctcttctcccaaggttttaaggtacacattattgtcaagtttgcctgattttatcatctccaactctctagttaattttcttgccaatcttttatttcctgcgttttcagcgtcagaaattgccttcaaatatctatactttaataaatcggggaaataatcccgttcaattatattttccatacatgccacgtagtcatcctcatttaattcttttacctttttacgcttttcaagtctagcaagagttgatctatatggaaccagaggctgttcaaccttagtagaaactccatttactattccaagtgatttattcaatgttacaatactttgtttatcatgttttctaacttcgtgtttaccatatagcgagatggattcagacgtatgtttagagaaattatatgatatatttgatgaagaatgacctttagtatcaggatttaattcagataaattccttctacttctcttagtaggatgtggaggatcagaatcctcttcactcgactccatttatctatattctaaaccataataaataaaaataataaataatggaaaataaaaatgaaaagtaaattataactgttatattcagtaatgttattgggtcggatgattcaattattattataaattataaatagtaaaaattttaatttgtaaaataaaattttaaaaaatgtataatataattttactttttggtgtaaaaataatattatgatggaagttcctggagttggttcaggaattctatttgaaaactactattcaaatttattcaagaatagatgggaaaatttatacaaatcactcaagaatcccgttaaaaatatcgcactcattcctcccttttattctaacattcctgctcaaaacgattttcataattccactgattctgttgataacttagaagattctaacaacaatttaactgattttaatgaacttccagacgatgaattggtatacaaaccaacagtattaccttggtgttatgaagtaactttcaaggccttagttgacccaaaggattacgataaaatattatttaacaagaatattttcgatgccaacggctttgtttcaagactaaacgattatatttatcacctgggtaagtgatactattagttaatttgtttcagacggcgcatcagcatttggggcattttgtttagaagctaagcctggtgataaagtcttagatatgtgttcttcgcccggtggaaaaatgatcatcatagcctctaacatgttctttaatgctatgaatggagtaaatgggctaacaaacggtatcaatgggtcaaacatgacaaccactgaattaatagatgaaataaagagtaggatgaacataaataaatcaatgctgagtgagaaacatggtgaatcattattggtctgtaatgaggcagtaaaatcaaggtataaaaggttaatagaaacatctaagaggtttattcctgacaagtttatctcaggaaaacacatccaatttgtaaattatgacgctaccgacgcgaataaatttcaaagatttggtaaatttgataagattttaattgacgcgccttgttcttcagaacggcatttgatacataaaaatttatcttggagtgttaaaagtattaaagaaaactctaaaagacagttgaaattgcttcaaactgctatttcactactgaaatctggcggtaccattttatactgtacctgcgctttagatcccatagaaaatgaaatggtattgttacacacaatatagtattattagtgttaactatagtattaacacaatttttaggtgataaatacaattttaaaggcatacgatgatatgaaacatgttgagattagttataaagacttaattaacaatgttactagtggtaaaaatttggggagtatggattataacaagtttaagccagaaaaaagaacttacgggtgttcaataatgccagataagtctgatttcggacccttatacattgcaaaattacaaaaactatgataatactacataaatagtataataaaaatataataaaaaatttattaatatgtgttattctaagccctatagtaaaatgtgtatgatcagaatgttgtttttataaattatttactttgaaatttctataaaagtatgtaataataatttaataatatgttcatgtaattttatgataatttttaacctgttttaaagatggcaaagacgctttcctgggacgatgttaagtggagatcttctatacgagttttcgcctcaattttaaaatatcacattttcttaaccttttctataacaatttttaacctcatactgtttaacatcttcagattcctcatttcctccaacagtaattagtaatattctaatataatcatttttaggatcacctttacttaatatatggaattcattctttaatctgattccatcgttcttttttttacttctctttctctctttcagacatatctcattcaaaggtatggtttcctagtctaccattatgataattatataataattgttgttatgttgttcaggaagtttcgttcgttcactttatttggacttttgttcatttatttcaaactttttaatggttttcgcagtgattttaactgcaaacacattgattaaaatcaaaatcaccgaaccaagacttttcttcgtactcttaggatggtaatataacttgtatatatagtttttatttttaacacaattaatttatacattttttagttttaacacaattaatttatacatttttagttttttgaattatttgaaagttcgtaaacaaaatactgatgtgtgtaaagtcttggataaacagaacttaacgactgtgtacctgcgttcatatttcttccaggtacttttacatagttttaacacagctttagagcttttttaactcacttttatcgtattttgtcactttggtattcttttcctctttaaagttcttgtacttcttgacgtcatttttaagcacaaatttccccaatgtcgaggcctacaaatacagaaacttcctcacatacttctgctacgatgttaacgcactgttatccaaactcccttataccaccaattactatcacttctcattcaagtaattttactagattgttctttattcatttttaattattaattgtgattgattagtttttttgagggtttggagttgtttttgtcgcaagtctggattctctcactgtcagactactatttggacaaaatgagccttgaatcaacacatatggtatgataatagagcttaatgtatttaatgtaggattattatatcatgaattacattgatgaaatgcccatacacaacgtttccaacattaacgatgaagtaactcactatatagttaacattatacagctatacagttagtattaggactatattaagtgctatagacctaataacatgtgttttagatgttatatgctagagctgcgtataattataccaaaggagtatcatatacacttaataatttaaatatgaaatatgtatcgaatccagcctccatcaaattccagaatggctgggcatttgatggttgcaggccaggttatcacccgtttgaacggttgcccaattcaagattctttcaaaaatcaatgtcaaataatacttacacactagaggctaagaaggatagataccaacttgacccagtagtatacaaaatgctactggataagacgaagaatttctggtcaaattatgtccaatcatgtctagaaacaatggatgaaagcagtcagaacttgcatcacttgatagattacccattttccagagagcagaaaatcaatattctggaaaacaacatgcaccagtttaacctacaccaaaatcaaatgggattttacacttcatttcaatcattcctactatatctcgcctcatacttcaagttctttcatccctcaaaatcactctcaaacaatgtaatccactatactaagtagttattatacagttaacactcagtgcttcacattactagtagtattaaataatgataatattttttattagttggtgaacatgttgttgctgtgtataatatatttaagaggaataacatcgtggttgtgtatcgcaaatatgatagggcacaatcaagatagtgtgaagattgtagcaaaggacgtgatagtacaatctgtaggtttattagtgtaatattgagtgtagttgaggatccataaggcactttccaacttaaaccttaccacaataccctcatacattaaaagctacatcgaaacactcaataacggtactttaaacttagtgttatatatttgtgtagatattaatagcacgttgaagcgacttgcagtttatactgaaacgctcatttactcaaagtttgacacaagttttgatacttatcgactcatggaacatctctacaataatcgcagattatccacataattaacattattattgtttaatagctgggaactggagttcattggtttggatttggagtgtaacaattgggaattggagtttaataactggaaacaacagttaaatggttcgaaattgtacttaaatgggtggaattagagtattaattcctaatgatggattaatggaataattttaaagtcaataatggcttcatgctattaatgtgtatatttgtacactacttaaagtaatattactgagtatatttgcttccatattcagcagcctgagttggaaaaaatactaaaattcaaataattgaaaattttaatagaacaatttttaaaattgaaaatcaccctaaatcagtggacgaaaggataaatctaaaaaatatcgcaccatagtgtggattcctgaaaattagtggaaattaaatgaatttattaccgtttgagtaaattcaagttaaatataatgtaatgtaatacttctcacttagtgtaattttaaagcatcttaaggctttgaaatggcccagactcctccattcaaacttggaatttacggccatgttgaacatgtccttttgaagtttaaatcgaccgtccaaattaaaaacatccatgaaggcttgatttcattttaccaaaagctactcgtttatgatccaaactcattttatattctgtaattcctctatttaattattttttaatttctctatttaattattcttaatttaactccaattatcaattttctaaatctttttatataattagttctaacttaactctttataaatattttaggttgacgagctctttcgctctgatgtttatcttaattttcgcatattatcgtttaatggagctttcgaaagtgagtttcaacagtgttatttgggtttagagttaccaaagtattattcgccggaaaatcgaatttcaggagatttctaaggacagaattaaaagttacatgttaaatgttctcgaggactatttcatctaatctatgatcaaatgttttttatagcactttctgtaatattttactaaaatctacaaaatacaaactagttaccaaccatttgaaaactagttaccaactataacttgtgtaataagttatttatttaaaagattagtataatcttggagagatttaagtttttcttcatattctttcatctcatctgaatcagttatcaacaattgcgtaaaataataataatatttccgtaaaataatagtaatttgtataaaataataataatatttgggtaaaataatgtaagatctaaattttatcaaataatttaaaaaattaaaataaccgtaaaaagtgtaaaaattacctttggacagtagtggtgtgagtttgtcgagcttattttgtacaactttagtaacgtttttaagtttaaaatacttcgaggtttctagtgggaagtggagggcctggactaatttcgagggcgcgtagaaatctaaagtttccaccagcgttacacacttttcaagacaccatacgagtctctgttcattataatactgcggagaattgaacaaatgtgatgcgaaacaaagcacctcacatctgtgactcagtcttgtgaggttcagtgcgtactttgccaaaagcattgccacattgaggtaatcttcactatctagtattgttattctacttgagactgctgagcacatgtacttaatgcagtaaacttggttctcaccgcctgaaatctcatcttcatagcagttacacgccttcattagaaagtccaaacacatcatcttcatgtcactaattagatttacattctcaccaaacactccaactgttgatctcgtaaattcatcaacactaatactcactaataccaacaacttgagtgttttctaaacaattagtaaatgggttatactactaatatgaatgggaatattactatgtacaataacattattacgaataataactagtataataatacctcgggtgttatgggttgtaataattccaacaaattatgtatgtactttagaatttccattgagaaatcgtgattaaatgatattttcatattcttaaactgtgtatccggtgtcttatactgggaatttgaactcttaaactgagtattcgtagtattaaaatgttgatttgtagaggaaaagagtaaagttaaactacagtttaccaaacatggtaaagtatgtttagtacgaagacttccactctttaatatcctctcagtcaggtctttatatatcccaaattgatccgatacatccgaacactaaaaaatcattagcacagcaaagtatcaaataatatgctaaataatggtaatatagttaaaatagtaataaatataaggtaaatatagtggtggtaccttgatggcttgaatgagcttacaaatttggtattgttccagtttaatcttttctagtacatagtctggtatatattcacccttttcttcattgaatggaagaaatagcggtgagactaagttgaaaaacacatcaaaacttgacaattcatccattaaaatatttgttgtcaccaactcgtctatcaagttgtatgacatttccttcctcatttcccagttcaggaacgagattaacttctcattataactcagttccaaggcttttagggataatgtttttattggcactgtgagcaattttactatactatttgcagctgggccttcaatcactacatcccccaagctgtttgacagcacttctaccactttatttagtacaaattccacatgttcaactgtgcctggatacagtgtagttgtaaattccagaaaagctgcttgtaagtctaaatagcctttgattcctacttggggtccctctggttcctgattactcagtacgctcgtgttgtagaccacgttaattgttgacaaatgcttctggaatgtagcaaatatatcaactccttcaggaagtgactaaaaaatgttataatactaaaattacctcaggatttgatgtcaaaaatacggacagacgattcatcatcgtcatcaatatcgatatcccagcatctaaccatatataatggtgtgaaatatgagtaaataggaatgaattatgggtaaattaaatataaaatgatatagtttgttaagcgtacctgatttaatggatgagacgcaagcggataaaatatcatcaatagtttgtatatggaattcatcactaaaagcctgaattaaacaatctaataaatatttctgagcaacattatcatcaatggatttgatttcattaagtatccttggcagtgctgtggatgagtagaagttaatatcaaccccttcaagttgagtgattctgactaaattagcacccactaacaggcccaattctagtctttccttgtcaagttttttcttatcatttccagcagtgtttaacctgatccaaagtcttattgactcacagaagttattcattaaaaagtcaaaagagtccaaaaatccattctcattatcgggatcagagtctggtaatttatctttacagatttgaacaaggtagtatcttaggaacaggccacgcattgggtgttgaattcccttacaaagctctgtaatatcatccagaatttccttagcagttactttcttactcttgatatagtgtgctcctaccattactaacagatatagacgtggtagaataaatgttgcttgttgcactgaaacgtataattctggtataatattcgttttcttggcgtggtctccgataaaatctgctaagtactcaagttcattaaacactttcatataaagttcatagtaatgtattggtgacagtgaagaggttctcaactcagagattatattcgaaccatgtttcaaggaattactcacatcttccatctcctacattattgttcactaacattttataaatatttaatatatatttgataaaatgttgtaaaacagttgcgaatgtgtatagatttggaaataattaaattcttggagataaaaacttacaatggcttttttcatataataagactgttctttgacgaagaaaatagcttcttcaagcattttaccctgatcgagcggttgataattatcaaccatgccaacaacggagtccgataacatcataacttaaaataagggaaaataaatcacattctattagaaaatttgaaatatataatttttaactataaaatttacaatgaaaataatgaacgtaaattttcttctaattttattctaacccataccaataccattgtcgtgtaacaagattacacatttaaaaaaattttaatatcatgtgtaatatataatttttatattaatttttttccttttcttttattatttatcgttttctagacatgccggacgatcctaatagtaagcagtcaaagttattgagattttcaaagcttaactgcctctggaatccagaggaatcgaaaaatcccaaactgtacgatagctattcttatttggatttacacctaaaccaatttctatccaatataactgaagactactcttttttaccaaatactatatacaaaccatcaatccacgtttttattaataaccgactagtatacaaaacaaagattttagattataataatgatttatttgatgaatctataagattaaagatatattctccaaatactactgtaacacttaaactatttgaatatgaacagtttaatactacaaatagtgatgaacttaatttaaaaccttcgctatattccgaaaggacagatttacaccttgtttcatgggtggatttggatattagcctcttaattcctgagagggattataaaataatttgctcatttaagtcaaatccagcctttaatagttataatcctggcggtattttatattatccaacagagtccaacaggccttcaattttatttaaaagagtttgtgcatcttgtaaagtctgttcactattatctcacctctcagttggtgacgatgatcagtataataccatatttaaatactttgatcacaaatttcaggactcaaaatttgacaactccgataccaaagatgagttaaagaataaggaaaaatcaagtgatgatgaggatttagatgttgtggagattatagatatgtcctcactaactaaaaggtctagaaaagagtcctgcaaatgcctacaacttaggtatataccactaacttttaagaaaaaatttgaagtatgcttaaaatgccacgattatgaagtgtgctgtgatcacacactaagtaactattacttgtcggttaactttaaacttatcccatcaagtgataaaatcgatttttctactgaacttttctcctgtttactcacgtcaaaacagtcgaaacccaaatttgaagatttagcatcaatcttcgaacttctataccaaaaatattattctttcgagctactcttcaatcacgtgtaagtcattgttatagtattatagatattatgtatttagtattattctaatattgtgttaattatggattagaaactgtagtaaagagaaggcgttgttattttttaaaatttcacttctaaccttggttttgggttcaatttttgacagattcctaacagttttcttatttctaatggtatgtatacatggttaatatattattttagtcggcctttttctttgtcctaagaataacctcaacaacccagtttaaaaaagaccatggagatatattatatactagcaagaatttatattcactggatcaaggagttagtaacttagtgatgaagtatatagaagaagatattaaggagaaacccttaatagtgaatggaaaagtatttacagtagataaaaaggcagtagaaaggaataatcttaatataccagaacaccaaatagttgacaaaactaaagtatatacaaaaccttattcctcatataaaaggtcagaacatatagcactcaagactatattttacgcaatttcagaaagtatacccaagatagttaaagttgttctattaaaaatagatgaagtttgtgagcatttaatagtatttttgaatggtgtgctggctttaacaaggctatatggtctagaattatcatccatatgtttctttctaggggctacttcactgaaattctataaactttacactttcattgttaagttttcgttactgctgttattagttggatcactcgggcaagatgttagtcatgtaaaatatgccactagattcttaaggaatctctttgtatatttagtactaagggtttatagaaaagagtggtttctaaacacctaatcacatttaataccaattaatttaataatagtgaaataaacataatattagtgaaataaatgccatgttggttgtgtatttggtaaaatattatttcttcttttgagctaagtgttcaataaagagtaaatttagtttagtgggatcggaatcatctttaataatttgtctcttctctttatatacacgatattcaagttttacatattccattaacatgtacatatacccagaaatgaatgcgatacacaggccagtctgaagaatacatttttgtttaaaacttacaggagaaaaaatcttcttcctaatggaagtaaaattattcaaattcatttaataaattaaacattatatatctaatgagtaaacaatgttgtgaggagtgagataagaaatgttattttatttaatttatcatttcttaaattacttttaaattctgttaaaaatttaaatcatatgtaaatgggttgttttcctgttaatttgcaataactatacaggaatcatttgatttttcaacacataacagttttaatctttgagtatatttattttgttaaaattctaacaatatgacatcattaccaacgaaaaagaagtttcctttatcagctagcgctgattcctactatatgccaggagttgccaaagggttagttcttccataataatatgaataataattctgtagattattggcctatacgagatccgaactaggatacaaaaacgctacaccgtcagagtaagcttataattttatataatgagtttttagtccatttggaaaaccacctccaggttatataccagggaagggaaggggtgctacaagtttcgcaggcggtgtatctcgagatgacactcatgatgatagtgatgctaatgatttgggaggtccatatcaagtccactgtgagaatgaacagctttttaaggacgctgtatacgatgacgacgataaggaagcagacttagtatacgagtcaattgactccagaatggatgaaagacgcaaatcaagaagagaacaaaatttaaaaaatgaaatttctaaacttcgtagtgaaaagtaagatttaaaccaattaataaatattaggcctactattcatgaacaattggcgcaatataagcgtaatttatcaactctgtcaaaaggtaattttattctaattataaaatttattagaggagtgggaatcaattccatatatcggagactactcactgaagagaaaacagcagaagaagctacagacttatgtaccacctccagacagcttaatttactcctcaagagcaaatatgcaacacacttcatctattgggactgaaactcccttgggcttttccacgcctttggggattatgggagctaaaacaccacttggaatgcaaactccaggtggattcacgactacttcaggaagaaaatcgacacttaatctactcggagaagctagaggagaagtcttatcctcaacgcttgacaaggtcacagataacctttcagggcaaactgtagttgaccccaaagggtatttaacagatttaaactcaatgaaagtaagttactagttttaaatgatttattagactgagtttgaggaagctgatgttcaaaaggctagaacattactgaaatcgctgattagtactaatcagaagcatgctcagggctggatcgcagctgcaagaatggaagaacttgcaggcaaaattgaggctgccagagaaataatcgctcaaggatgtgaaaattgcccggataaagaagatgtctggttagaagcagctcgtttagaaaagccagaatacgccaagtcaatcctcgccaaagccattaaaatcattccgacctcggtaattatataatatttatactatttatagtattacttatattattggttatagtattacttatagtattacttatggtattggcacttatagtgttacactgcttactataccatatatcataccattaactatcggtttaggtaaaattatggcttgaagctgctgataaagagacttcaaatgataatagaaggagggtattgagaaaggcactagagtttataccaaactcgataaggttatggaaagaggctatttcattagagaatgaaacaaatgcatatatactgctgaaaagagcagtagaatgtgtaccagagtcactagatatgtggctagcactcgcaaggttatgtccatacgaagaggcacaaaaagtgttaaacgaggctagaaagaaacttccaactaatgttgatatctggatcacagcagctaaattagaagaatcaaacaataactacgagatggtaaggaatatatacatttatattgatgtttaggttgagaggattatagtgagagcaattgataatttgtcgaaaaagggagtagttcatattagaagtaactggttaaaacaagctgaaactgcagaagcaaattcgtttgttaaaacagcacaatcaataataaaggtatgtaattcgcattttattttctgtttagaacactatgactattggggtggatgagcataacaggaaatcagtttggttagaagatggtgaaacttttgtggaacatggctcatacgaatgcgcaagagcactgtataagaatgcacttgagtatatgaagacaagatcgtcactttggctggcactagttgaattggagtcaaaacacggaacacctgataaagttgaagatcatctcagatcggtaccttcacactaactttaatttatttttttaggcggtatcgtattgtccaaactctgaaatcttatggttaatgtatgcgaagcataaatgggtcgaaggtgatgtggaatcttcaagagatattttatcaagagctttgacaatgaatgagaataatgaagccatttcattagcagctgctaaattagataaagaaacccatgaatatgatagagcaaggaaattgctcgaaaaagcacgaactcgttgtaacacaccaaaggtaccgtttaccttagtttgttattaatagtcatatcctgccatagtttaatttataaactacaccatgccacaagtcatacagcatagcacaattaatatataggtttggatgaagagtgtacagttggagcgacaattgaagaattatgaaaaggcactagaattggtggacaaggctcttgaaatacacccatatttcgataagctatggatgatttcaggacagttgaaactagaaaaacatccaaaagatgttgaaggagccacattaacatataaacaaggtaatatacacatatttacacaattatattggttttaggagttgaaacttgtccttggagtgttaatttatggctcttgtcaattgagttacagatagaattgaaggagtttgcaaaggccagagctttggtggagactgcaaagaataaaatcagaacaatattaggctcaaatattaagaaaaatactgatatcactaaagtgcaaacgaaagtgctctcaaattcagaactgtcaaggatggcaaagctttcaatggactccgacgatcctgactccgtaaaggaaatgatcgaaaacatcatttcacaatgtgatttgatatggctgaaaggagttgaaattgaaatggaaaccggcgttcatgaaaacgcccactttgcaatgtcaaaagcgcttcaggaacttcctgactctggtcttctctgggcacgctcaatattcctcgaagaacccaatgcacaggtaatacactgaattaatacagttaattatttaacaacaataatagtagtattataatgcaatataacaacctaattcttaatgtttagaaaaccaaagcagcagaagcgttgaagaggaaccagaattcgccgcatatagttttagcagctgcaaagatattctggaattgtaagatgatagataaggctaggaggtggtttcaaacatgcataactctggatgaatcaaatgggatttcttggggtatttttgttaaatttatgaatgttttaggaaccttcatagcttttgaacttgactgtgggactgaggagtcaatgaaacaggcgataaataagtttatagaggcagaaccaaacagagggtacgagtggtgtagagtcaccaaaaaggttgaaaactggaacattcctcttccacaaaagctgtacaagtttatacaggaatactaccctgaagttctcacagataaagtgcccaaagatgtaatggaggtgcttaatccgacggaagtaaagaaggaatcagattaaattttaatgtaacaatattaaaacttttaaatttaagttaatctttagtgttatccttcttttttattttcttcctagtctttttagtagactgaattaatggttaggtggttattaaataggtgtgaatttactaaaaattggcgttgatttgacataaaattaccttttctgtggtttttttgacttggatttttgaagccagttcattatacatgtcatcccaccagttatgccattcatcagacttagaagatccaagctaagtggcaatgtaattaataaaacaaaccccggaagtgccttcgactttctttatggaaacaggcttcttaatgccgtcctcagatttaccaaggccctggcccctaaaattggtcataaataggttaaactaactccttccagccgaatttggataaaatcgaagcgccaaaagttgattcatattttttaccagttgctaagaaatatttcaaaaataaaacgtacgattaaaagtttttaaaagtcgttctctctgtttttttgacatttatttaaaaatgttaaaaatatgaatgcgataggtagaaaattaataagagaaggccttaaaaataattgaaatattataaaaaggtaatcatggaatctagaataaatataattttaaaaatgaattaaaaatgagtgaacgaaaattacttattaagtatatgttagatatggtgtataataatatgcaacaatgacattaagtattaatagaatctatgttttcatgagaacaaattaaaaagtgaaattaaataaaggataaacaaaaatctaaaatataaacataaagaataataaaataatgatgaatagaatacatatatatcaagagagatgtgtaaagaatatttatgataatcataaattattggtaataaaaaatcatttaaatgaagaaaaaactcataaattaatatgtagaatattcttttatatcaactaaatagtttacccacacattctcataatattaaggaatcttcattcatttaaatcttcctcggttattctatttataaggcaatttattctttattataagttaaagttttatattaaatttccagaattttctgtcggttcaaatttcgtgtcatgttttaaaagttgttgatcttactattaatttattgtccttccatttaaaaaaacgttatattttaaaggagaattttattttataaacatttcaacaataccattgaccatgtttgaaagattcctaggaatctaaaaaattacataaaatcacatttgatatactttaaagatgttcgatagacctatcaacttctattacagatatatcaaccttccgtacaccaggaagtcatttccaattgggttgaaatttatgtaagttagactctaaatttaatgccttagatactactgtgtcttcctaactgatctaatccaagcaattatatttcctacattgtcagacctatgtttatacgcggtgttttcagataacgtcttcgtaagttcaccaattattatagttgtgttaggttagcaatatctgcgctctacaccatctgggagcagctctgggaggactttactggtttctaatatcgtatctaaacttgacaaatgttatgtataatactccccttttttcatctctcatcacataccttcaattaggtaattttctacaatgtaaacctgatttagtaatatattcaaagtactacacaaataagaacagaatgttccatgttgtctggcacgtgacatattacactatttattcctcgctgaatgtctcacttacaaatctgatagttttggcgattaattcaggtaatttttagataaattatcgattatttagcggataaaggtggattcatagttcattacaatgtcttggctaaaatcggccatgtcgcaggccctttgctgaacattttaatcacatttctacctcctattaaacggaggttcttttatttcaacgctttaaagttccaaaaccccgaatacgtttacttggcaatttccatcttttgcctcctgagagtacgttcaataatcactaattatcattttcagatttacacagcatttgagctaaaaaatgctaaaagacctaaggaaattactaatggaactaaggaggattatttggaccggaattcaggaacgtatttcagagaagatatatcaaactattcatctggaagatattcctacctgccctggattgttctttcaatgaatatgttaacgactctcggttcaggtatttttatacaaccaactaactaataaataacactaaattactcttaattgatctaaatcacgaaatattattaggactgtcaataagtctaatgtcaatgtacatgatacagcatttcaatattgatttcattcacttgtggataagttcactgtcgataccaattttcacaacaatcattctcttcagtttgtttaacaatttttaatagatgtttagttttgaacagttatcaaaaaaggcacgggaaactgattacaatattcatatcaaaagctatcgcattagtgtaagatattagtaaattaacgatataacagattattgtactattttgttcattgtaataaggttccaatcataatagcggtatacatcttgaggtaagaaaattagattctgaattgcttagggcatcatttcaaaacgctcctggacctcttaaaacgtcaatagtgttacaatgcagcaacttaaagtctgcaagctactggttatcgtcagagtacttgatgaggattataatggctggaaccacagtcttaggaggtcacattttagatgaatatgggttcaagtgctgcttcctgcttactggtattctagtgtgtagtcatattcctttagcgatgttttacctgggttctgtgctcttggctgttccagcaatattcctgtttccaggagtctgatttaaattaactgttttatactcctgagattctccttagtggtgttgcaggattccatatctattttcagtagaattaagtgtattaagaatattttccagttttaatcgcagtttttaatattatcaatttattatacattaatatattatgttgagtaaattaatttgtaaaattttgttataaattgatttgtaaaaattattgtaaaaaggtattgtaaagttgtaattttgtgttattcctattataattctcaaatactcatacttattaatataatttttataaaatgtcgcaatctactgggcttggttcagaattgaaccatctaacagcttctcaacgatctgcagttcttgagaaactcaaccaaatccagtaccaagacaccatggacacctataatggcctcgttgaaagatgtttcaacgaatgtgtttctggcttcagatcaaaggacctcgataagaaggaatcccaatgtgtggaatcctgcgttaagctgttttttgacttttctcaacgagtttcaacaaggtttgcagagaaacagtctaagatttagcacactccaacgaataattgcaatttaataaattattcatcaatttaactaatgattcattaatttaacaaataatagtccagtcaaataatgtgtaaattgtaagaataaacttaatcaattttaaaattgtagtttacgtgattatttaatgcctcttcaagcttagttttcatatcatcagttctatcttcactctttactagctctttcaaatatttaggtatatgaatgtaaatgtcactcccatctaattccttaacttcaaactcatccgaagccttaactccttgttcctctaagtcctttttctcactaccatttccatcattaatcctatctttcaataagcattccattgttagtggattattgagtaactctacaaaaagtggttttgatgacggtatgtcctgattaacaattctcaaaatcagctcttcaagttctgtagtttcaaccattctctggaagtccaaagctttaaatttgtaaactccaaactctcctgggtctaaaccgaaagtaggaattgagtagtgtagtagcgacaactccttttgactaaatttaacaccggctcttggatttgtaacttcatttaatagcatttcaagaacagcttcatgtctgaagttcagctgtgagaatgaaaacagtaatctagagactaaaaacggtttcatctcattcattctcacaacaagttcatttgcaattctagtcatggctcttgtgacattatcatttatgtaaaagaacttagcgtatgcctgaacaatccacagcaatgagtgcatcttcccattagatagataattcgaagaaactttactcgattctcctacatactctagcatgttaatattccttccttcaaaactgtataaatcagttttatcaccagtattatctgtaaccgttttttcagccaaaccaacttcattttcacttaatatacaagggtttccagattctttagaaccaaatgatactcttaggtgcggacataaatcttcaaacttgattggaacgtaatcaggagtattttccagtataaactttgaaaaactatccaatagttcctcgtttttcacgtttaaaactgaaaatgatctcaaaaccatagccacttcgtcgcaggtataatttccaagatttaactggatgtgcttccctgaaaagtaaaacagtgctccgtgtaagtgcttagctctggcatatgagtataacattgatgcaatcgctcttggatataactttaatgagttccttccaacatgctctgcaatcttatcatacattttcccgtcctatattcataattaacacatggatactgtgtgtagtatttaaagcatgtataaattataaactgatatattagtttgttgactaacagatagtgaaactctactgaaagatgacaaagctaagcaaactgagtgcatatcaaactccttaagcctcttcaaaacagtctataaataattaatattttttcacgaatacctgagataaaaacgtaaaaagtggcgtgcaacttgtgtaatgtttagataacgagtttaaaatcagtgataatgatctggaggccagtgggtcttttggtgacttaactctgttgtatacttcagactctataagtgatggcaggtacttatgtttacagaaatttaatcttgaaagtgagtttacactcagtgagaaaagcttattatcgtatgagttgagtaatttacaaaattgaaatgaaaggacagtaagaaacttatcatcaaaacctttaaaattcttacaaaatccacttaacagtagtgtaagatcatatggtgttaatttatctacatttgagtacaggtatgtttgtatggtctggaacaaattcttgttatagtaccccaaattagagtatgagtaaaaaattgatgaaacctggctcactgtcatcatatctagtcttagtgagatttctggaatcatcattctgaatagaaaatcacttctaaagttcagaattgaatatgcccttagcacatttgtaatctgaggtgagttaattagtctaatgttctctatcagtctagctgaaatcaactgaagcatgttccgatctctgtacttcatgtacccataggaatgaagtattgaaactaggcctctcagatcaagtttatatatcgattctatagtctttactgtgcagtctctccatacttcaacattagtctggcctgacctagctaagtaataaatcctcttaaccaaatcactagaatcagaattatcagtcccagtagtagtttctgtggtagttcgtgttgatattctccttgcatttgctccattcagtaatagggatatcctctttggtgagatataagacaaaatcctacttagctgcatcatttatcttatcaatttcaaggagttcctctgagtatagttgaagggaatccagccctccccaattaagtaaaactgagcaaatgtgatttttaaagacctcatcttccgtatggaattttttaacagactccaaggcactaaaaattataaaatttcttaaacctacttcatagcattctctacgatgtgttctgttggcattgagtaagttcctacttttacagacctaaaatattatattcggttactgaacgtacatgtatgatccctgggatagtttataataagttgagttaattgctgtgagaaaagcgtttttgattttgttttttgagaaattcactccaattggtaatctaaaaacacatttaggggttaacacactaacttcttcttctgaatgaaatatgagcctaaaagtgatgggactgaaggcactaccgatttatcacacaagaacagttcaaagctattgcataaagctcttttgtcctcgtatttcttgtactttttacgtacttttccaactccgatgacctaataatattatctattgaaaaccaaccttcttaatttctggtatttttaattcagaaatcacagccttccatgttttctgaggatctttaaccagcacgcatacgtcttttccagaatatatagggtgttttagttgtctgaattataattatactaatttaaaacatacatctgtaatggtttaacatgaggttcaggcgggactttcgagagtctaaactgcaagaaaacatattttcctgaggattcatccaataaatctcgttcgctgacgttgctattagcttctctcttcttaaaagcttcaataactttggtcagttgagcagaatccactgaaaccttcttattatcggcagaactgggtccaggagtatgttttataggtattacctttttattaggtttagattttgctcctttatctaactttttaacatttttgcttgatttatttttgtcattcaccttattcaggcgatacaacttcgagatagccataataaaacgctattttaaatgtatgtacatcgacaaaatttatgcaaatatatattacaaaatccagtaaatattttatctataaatacttaagaaaatatggaagttgttctggggagtaaggaaaggttgaccaaaatgtttaaaatactatattagaatatgacacattaaatcaatgtttcaaatcataaacaatgtttggtattttattctataagatattgttaaaaaatgttgtcgatatcatctactcaataaacctatgttaaataaaccgataaacataaatatagaaatataataaatttacttcacaatttctaaaaaactaaacaaactcctgttgatgttttaaggataaatttattttttattctgttgatgttgtttacacatatggtgttacacatcaagttcaattataacttttaataatcctatgattttaatgtaaatgttattgtactatattattgtattatttgttttaaattatactagagttatttcttctattccaacttctgattcattgaaaaagccattttatgagattcaactacataaatccgaggattcagatgaacattattataaaattctcaatgctgagagatcttctcagtattcaacaaagttttatgacttaaaaaacgtattatctagcacaatttcactcaaggctgattacacatcaaggttatgggctacatattatggcaatataatacttggctctaacaataatgaaaacaattctttcaaggttttgttcgatacaggctcttctgagttctgggtcccttatgaaatgtgtttatctcagcagtgtttaaatcgtaaaaggtaccataaagggtctgaatggatagccaaacacgacaaacatgggaactatgttcctttagaaattaagtatttatctggccaaattgatgccattgatggaacagctacagttaatcttctcaacggcattactttaaaggatgttaatgtcggacttgccgtatgtttaaactaatattaatattccactagactaatattaatataccatttttggataatgcacactgggatgggattgttggtttgggtttcaaaactaaagatatggaatcacgaggttcaagacctctttttgagtcaattatgtacaataaatcgctatatccaaatttcagaaatcaagtcgcttattatgtaacaaaaaatggtattagcagtcaatttaacctgttattaggtggaaacatatcatttggtggaattaatccaaattataaacgatcgcttgatgacgaattcttgtaattctttacacgtaatctttatgtttagatgggctccagttgtaaaggactccatttactggactctaaagttgaaaaatatcaaaattaagaataataacattaaccataaatcaaattcattggctaaacaatatgaatttacaaacctaatgagtaaaatagatggtatgtacacattaatctcattagttgtcagatgtgaaggtaataatggatacaggtaaattctaaattttcctaatttttaggatcattcctgatttatgcaccacaggtattctcaatatatatagaatataatttaatagagcatgggaccgctacttagcagattacaggtttcctcatgtgaggaaatgaagcataaaccaaatctaattttcgtacttgaaggaaataaaggatcaggtactaatcaatataatactcatatttagatgtaaatttggaattaagacctgaagattacaccatcatctatgaaggatctgacggtgaaaagcattgctcacttggcattgtaccggacaatcaacaggaggtatagtttaatggattgttattttgggataggaattggggtttagcgcttggacttttggagaggtaacttttaaaaattacaaaaagagtttatttcagttgttcatgagagcctattacactgtgtatgattatgaatccagagaagtaggttttgcaccaagcaagaaatcagactagaaacacatgaaaaattagatgaataatttctaaactaatatctaaaattcatgattatataataaataaatctacacatcaatggcggttggaacgtgaaaatagtatcatgagcaaagaacggtgttaaataaacaaaaatgaaataaagatcaaaattgtgataatcataaaaaaatctgagaaatatgtgtaaaagtaggtggttgatacaacccatgattctgcagattttaaatcaaaatgaaaagaaaaaatgcagaaattttacaagtagaaaaaaatgaaatttcaatttagatatatcaaatatgaatgtagatatttaataaaaattatatgtggactttatagcaccaaactggtttatcctaatgtctggggttgaactacgatttcatataatgctgatgtacaattggatcccacttcttatttaatatatttgcatatttttgttatgtaacatttttcccttggttttttaatttatatccaaaatttttatgttttgtatattattataatcaagttgaaatcagtgcacatttaaattatatttaaataccgacttccctttaccttttcgaaattttctttatttttatttcactcgatccattatctattatacgagatagctaagtttctaatctttgccctcgtttacatatttaaaccctttgatctttaaagcagattttttcagcaacccatttcaatttcattatttttgatgtacgaaaatttaatataacccatataattttttattagactttttatattatgacttccaaaggttcacacataaggaagcaatgtgattttacaaaactgtaagtttaacaattaacccacaatctcattccatatttagtctaatggccggttatgacctggaattggtaaacggcagcacgcaggagttcaacgttacctttcacggtcctaacggaagtatgttttcccatttctatgacaaaatttacagctatatatgaggatggagtgtggcaagtccacgttatactacctgatgactacccattcgcgtcaccctcaataggatttatgaataaaatgctacatcctaatgtagatgagtcgtcggggtcggtgtgcctcgatgtaataaatgaaacatggacgccaatatatagtaagaatatcaacaaataaattattttaataggcttggtcaacgtttttgacgttttcctaccgcagttattaacatacccaaacccatcggatccactaaacaatgaggcagcggcactcatgatgttggataaaacaacatacgaagagaaagttagaggttagtaatatatcatattctcaatgttaatatttagagcatgtaagaatacacgctagtaaagaaatgtgggagaaaaggagaggatttactaatcaagaatcattatccgttgctaatgatggagaaccgagtgacatagagagcacagtggatgaagcagacctagaagacttctaacccctaaattccaatcaaatttattttttatcgtttttatcactcggcttctccaattaggattcttacctttctatcgcacttttctgttttcaccgctttatttcacaaaacctttatattttaatcatttttaattttatacattttatgtatattcttattttttgtataaactttattttttgaaaatttctaggttgccggcattacacactacaacgattcagatttatttttttagaggaataaattatgagaactttatttcctcatgagaaacgccttagactgtgcctttatattcatttaaataattaattaaattacttatataccagaatataactgaattctacacatctataaaccttcaaccgtttctaatttgatattttagaactaatggcacggaagaggaccttcaaaataataatgggtattttaaataaattttaaaaattttaaacagatataacccgagtaatatctgcctaattcgggcaccgctattcaatttcctcacagtagaggcaggaacaccgattattttaaaaccgtttaaaagtccactagaaggacatcaaccaggtaaaataaaaagattccttagttcacacatcgttaggtgtgagtgaagaatcccagaggaaaacgctaggatgcagaatcaaatcagatacgaaatccttcctaagagacttcagagcaggcatatacttggaaaaaccagaatccttagaagacctgccaccagataatccactggttttatacacatcagaccctgatgctgaagtgcaggttgaaatcaaagtagattcgattctttcaaggtattccgtctgttctaatagtttgatttaggttcctgagagaccatcaaagacaaggtgtacagtttatatttgactgtttgatgggtttaaaagggtttaacggaagaggctgtatcttagcagatgatatgggttagtgtttaaaactaaacgggaactataggtcttggcaagactttacaaagtattaccgttatgtggacgcttttaaatcaaggactggataataaacctggtaaggctctgaattactcatctagcacagctgcaaggaaatgcgcaatcatatgcccggccagtttggttaacaactgggaaagtgaaataaagaagtggctgagagggaggtgtccctgcacaccagtagctgaatctagtaaagaaaaggtgatttcttcctttcagggcttcaaatatgatagaacagttcgtttttattgaaataaactcctttagtcgagagtaattatatcttcatatgaaacttatcgccttcactgttcatatctcgagggagttaatattgacttattaatctgtgatgaagcgcatagtatctgatgagatatctaattttatttagggcttaaaaacgataaaacaaggacatctcagagcatttcaaattcctcagctaaaatgagacttatgctcagtggcacaccaatccaggtacttttgaggtttaataagttatttttagaatgatcttaatgaattctactcactagtatctctgtgtaacccagatgtgcttggggatgtgaacagctttagaagaaactttgcggttagttttcatttttatcaacttttcagaatcccatacttattggaagggaaccatacgctactccagcagaacaacaaaaggtaaagaatcatttgataaattatgtttaggcgtccgagagactagctgaactatcaaacatcactaaccagtttgttctcagaagaacaaacgcacttctggccaaagttctaccacctaaaatcatcctggttagtctaatctatataaattggttaaatttagaacgtcttctgtaatttgacggatgttcaaaaggatatatataaatcgtttgtaacttctagaaggtaagattagtaatttaaataaatgaattaggtggaagaatataatgaaccaggatacagtagtaagcagagcactttctgccatacaatcattaatgaagttgtgtaatcacccgtttttactaaagagaggtggagttatggtatgttagtgagttttcatattctttagtcatcgccagacgtggattcactgttgctagatatcgaaaacgcgacgaaatcctcaaaatacaaatgttgcagatgtgacctttcagggaaatttcttgttctatatagattactttatcaaattagaaggcatgggaatgacagagttgtgataattagcaactacactcaaactcttgatttatttgaaaggctgtgtaaggagtgtaattacccattcgaaagactggatggcacaactagtattaaaaagagacataaactagtgacggtatgttcactagcttagtaatctaatttttagacctttaatgaccctaattctaacagttttatattcctgctgagttctaaagcaggaggttgtggcattaatttaatcggagctaaccgccttgttttatttgatccagactggaatccagcaaatgataaacaggtagttttttgattaatataaataatttaaaggcgcttgctcgtgtttggagggatggtcagactaaagtgtgttacatttacaggttctttagtacaggaacaatagaggagaagatttaccaggtaaacaaaacataattatctatataataattttagagacaaatttgtaaggacggtttgagttcaatgttggtaactgatggaatcaacgagttgaaggatagtttatcaggtgaatatcttaagaacttgttcgaatacaaggaaaacattatatctgatactcatgacctgattgagtgcaagagatgttccaatcaggatggtaagtttgttaaacttataattaccttagggccagtaatgcatgtacctcaagacaaggacttcctagaagacggtacgtaattatactaaataaattgaatagacttaaacacatgggcacatcactctgatctaactactattcctgacgaatatctggttagtgcagccactaaaaatgagcctcaaatacaatatgatgacaagaggataagtgatgactttgtcccagtgtcatttgtaatgacctgcaggatcgaatttcagaatgtagaagaaagcgtaagcgttgaaaatatcggtgtaaaggtaaagataatattaattaattaaaatgtagaaaatcgccaagtctgatactgtgtcaactacatttgattccgataatgaagactacgtgccaactcaggaaagtgtggactccgatgactgaatatgcattatttaacatttgtcggctttccacctggaactagcattgctacattgtttccattaactaaggcgtcattcaactctgttgttttgactccatccggtgagaaggagtagtcgacaacatcctccaggacctaaaatcatcatgaatattatcatttatcaaaccatgttcatatagtcgtcaaagcctctaagggttcctgtaatttccttatcgttcttcattatgatccaaattttacttccgagacatttatcaatgagtgccaacggaagatagacggcgctggcttcaattgtcgacattgtagagttttataagttaaaaaattaatataaataattaaagtgtatattttaagtaaaatatgtgaaatatttgtaataaaattgtaattgtggtttacaccaccggcaaggaataaaaattgaaatttgagaaaagaatctataaataaagtttatatataattaatagtgtattaataatgtaattatatgtaattatcctaatttgggatatctagttttaatgttttgttttctgtttaatatttgtataatactgttgaattctaaagttatttttcgacacatcaagttatgtaaattataatatccactgttataaatacaggatggtataaaatgttgttttataaaatcattgttcctaaatttggaaattttgtgtttttatttttaataaacttgataatggatggaatttgatggaattttaaaatattcgattatgtagaatagtataaaatgtcgagttttaggagggatcaaattcccgtggtggtatctgcttttatgaatttcgtttgggcattctcgtcatttctgagtgtcgatatggtcaaactgtattcatactactttatgcatcaaatcaacttcccaactctgtactataccgtgttcgcattttcattcatttgtttcactttcttaaaattcaatagagtattcacaactgtagtcattatatggttcaattttctagttcacttgttgttagtatttttcatatacttccctatcaaaaatcgcatattctatagattgttatttgcattctggagtcatctgtttgctttaaacctgattgcaacattatacctagcatcttataatattggtggaataaacggcttggtaatgggtgctgcatcagcatacttttttggatatctgttattacatggagttgagagaccttcagatttcagtatcgcatcaaggaaaacaacatgtaattggtttataagtgtaagatgtttttttagtatcgtatcttttatattctacagggattatttggaatattatttctacttcgaatacaatgattctgttaacagagtaacaatggaaaatttgtttaaatggtttgatggtcaggaggttgatttaatgacaacggtaaggattaatgatctaatgcccacgcatatcaatttgggttgtttgaaatacttgttagctccatctcttgctcctgctgcttatttagcggttatttatatgtcgttctgtacaacttcaatgttttcgccccctttcaatccaactccaatagtttcatccatttattttagagacgatatttattttattgaatatctaggtggctttttaggtgcacttatcgccgtcctgttacgtccacatctccataaacgatttgcgtcattatttttaatacactatctaatttctggatttttgttttttggtttcaacacttataaacttgatttgtataataaaaaaattgtactatcccttttgtcattcttttcatctatcctagggacatttgtacttgtttttgcttttataaatttcctgagtggaaaccttacatttaagtgtaaaaaacgtagtccaagttgtcaagagtgttgtgttaatgatacaggtatttgtttatgtaacaaaaagaattctaatgaaccatgttcaaaacctcctccaactgaatgtgttaatatttggctaccatataacaaccacaatacatttcgtgattggacatatggtgattgtattttttgtcattcacaaaactacaaaaataagaaagctaactgcacatgctgtgcaggtgcacaaactaattgttgtgcctgttgctgtccaagttgcgtcactagatctccttgttcatgcagtccatgctctcaacgttgttcccagagatgttgttgtaaaacaaataaaactcgtcactatctattgaggaactgtgttgtctcatgttgtccctattgcgattattgtctgttgttagaatgtgttaaaatcccttgtgtatgtccatgtaaacacagaacttgtaaaaatagaaacgaagttcagaacacaacactaggtgataaaaaaaattgtctggcaaaaataaaactgaatattggcaaagatcaaaaacatttttatctatgttcgtattctgatgcacctgatttagagaaattgaagaagttattttgttgtaaaaaccaagatgcttcccaaaattgttgtattaaatgttgtggagacaacgaaaacatatgtggtaagcattttacaatagcggatcataaaatatcatcgtgttgtcattatcaattgaaaatttggattagtttgaaagaaataaatagtacattccatattggtcaacaaccatttgataaaaaatacgaacaaatcaattcgttaatatttgcaaacgataaatgcaaagaatgttgcaaaaattgtggatgctctgagggaacaaattgcaaacaagtagatatattaaaaattaatgaaaaagataatcaatcagaatgtggaggatatcttaaaatggaatgtaaagggtctaatggagtttgcaaatgttgttgttgctgctgtcaaagtacaggagattcatcacaatgtgagtgttgttgcggtagctgtcctcaagcaaccacttgtcaaaataagaagtgttgtgcgatgaagatacttccaactaatttaccgtatcattttagaaagattgatataaggagaaatgaagtaatagctctagtgtgtttttcagtattaatattttgtttggttaagttgatagcatcaatggtaatatcctataaaatgaaggaatactatcttccaataagcttcaaagttagtgacttcacagaagttcaaaaagtaaactttaagaaatatgagttcaaagaatataaatcagattcacagtatgcgagaaaggtgtttccagattatgaaggtgatgaaaagtacttgatcaagtatgccttggatgttgagatccaactattagaaaggaaaactaatttaattagagacttcatggatgagttaaatacgctgagatttgataattggtgtgaggatatgattaaaaaccaaaagaagagaattacaggaccctatagcgaacttaagttttatgcacacttcaacgcataccttgattacgctttgaagtacctagtattcagagatgcagatttaatattttattattttaaaaagtatacacaacagtgggaagttgaatggaatgattttgaaaaaagatttctcagaaacctcaaaatatacacagattactcattgagcctcaatagtgtaggatactttgatacaaacacagagcttcagaaaataatagataacagacaactatccatattaaaatttctaaattccagaaatgatcaactaacaggttatctatcaatgaatagagatttgttggaaaagctaaaaagatcaagtaaagaggaaaaattacccagacatattgatctttgggaatttagattaagtttaataagggaatggtcagctgatagaagtatattattaaattggaatccatttgagtactcgatggacatgatactattgtggaatgacctgttcagagacctttatattcaatcatttgtatcaacatatcgaaacaacaaacatcaagatgttaacatatgaaataataatatgtttgattcttattctatttatttcaacgtcagtccatatattctactagattttctcactaaattcctctacacatcacttccatactagataattattttattattttggtgtttttatattatatgtcaacgtatttatattttattagtttttaatttactaaaaggttaaatatatgctgttatcattacgtacactacctacattatcaaatttttatataaaatgattaagttctgttaatttataaaatgactcaaaatgtcaataaaccaacaattattcacaaattgattcaaaattcactaaatgttacgataaaaaaatcggaaagacaacagaatctactgaaccaaccagaacatcccagacattacgttggtcacctttatggaagaatttctggaattacagatactgaaaataagtatctaaatgtagaagatttggatgatgtggttcgttccatagtatacttgagtatattacacaacaagaatgtgctggtagacttaaacgattcatatacaagaacagctaacgaaattagtaaaattaataaaagtggagtaaataatgaaattcttgggagtttgaatgaaaacaccaactctacaggttcattgaagtctgaactccttcttgttctggaaaaggtccagtcatttctgatctcaaatgcctcaattttaatgtcattccctgaatactttaccattacagatataattagtgaaaatgagataaagaaggcatacttgaacgtatcagatgagagagtattatttgaaatgttcctagactatggaacatctacacataatgtcacatttttacaaaagttggttgctgagatgtgggaaacagacgagaatgtaagtaaagaagtcttcataaatatctttggatctctgaggaaaagattaatccttagaacactaaaatccaacgcttcaagtgaagctaaattgttaacggagctgtttgcttacaaaccattagtggaacttttcctttataatgtagtaccagttgagttgtaccatgaaatgggtctttcatcaggggttaaaatagagctaacttcgttttttggaagatttctaggagttacaaccctggacgaagaacaatatgaagtgtctaaactgcttggtattaaacaactatatgaaggagcaaaagtggatagaacaagtgacttttatggaaaaaaggatctcaatcacctaaagtcagtgtttaattctaaaagattcgaaagcgaacactcaatgaataactttgttcagctggtaaaggttattttaaaagtggattcaagagtgaggaacaggtttttatcggttatgggaaggttcatatcatttaacactaatcgcaagaaaatgtatggtttaacacatattgaaacgcccccaatttcatttgatgaaatgtactttcgtagactagttttattacccgataattcatttggattctgcgttaactttacatggcttctcctgttgctggcccagggtatcacaatacctaaatctgatgagatcgacccttcttactgccaagcagttaacttgataaaccaagaattggaaggtttagaaaatgaatcaaatgaagattctgaagcggtagcagataaggtgcaagaccttggagaaatggaaaaggaaatgaacaaaatccttgggtttttagcaacagcatcatgcatgggagatgaaaaccaagttaaaagttcattaaaactgctgaagtctaacccctctgacctgtacaatagtaagttcataactcaaatattctggctcacactcaagtcattaaacatgatgtttctcccaagcctgcaggaaaacttgaaaatactgaacaagactttagagtatgcaaactcgtcgtcaaatttgggaattaatgatgataagctggcaaactacatttcctacgtgtatgtttggagaacagcactacagcacccatcactccttaaagctctttggcactatgttcacatatcattcagactatttcttcgctgttttctgttatatgataaggaaggcaatgtaaagagtgattacaaaggtttgtatgatacttcaagtaataagtttggacctatggtggagaagtactgtgataaggtcctgaccgcagatgctggagtatcatcacctcaatttacagttttaccagttgaccttatagaaaatgttctagatttgataaaaaacatgacaattctgaaacattatgaccactatataaagccaaatgacacagatcccttggagtttatggattttgagctggtggtaacggtgtgcatatttataatgaagtgcccaaacaacgtaattaaaaacatacacattaagtgtgacatggcctgttctacgatcttatacttgtgtaagttttcaaaagactcagtgtcaagattcgagaccattaacgtgtgcaagctacacctgatggacgcgcttgtcaggactttcatatcctcacaaaaatccaactacaacacgagaatttcgtcaagactaaacataattcaaagttttactcagttttttgttctagaatcatatcggaagaactttgtcacatgtatcatatctaagaaggacctgttcattcagttcatgcacctgctgctaaacgacactaacttccttatcgaggaggtcgtctcatacttgactgagatcaggagacgtgaaatcgcaggaatctccttggatgaagccgctactgaggaccagcagtctggcgaaaataatgaaaacgcggaagatcagtacgtgcaagagggtgcaattgacgctaaccagctaaggtcaatggcaggccctgaacttaagggcagaaccaggagttttgtagagtacgggtttgagatatgtttgcttttacatattctctgttcagagttcccgtcagacatcactagtagttcagtgctcctacctcaagttgttacgtgtctggggtgctgcttggaaagcctagctggtcctaaatgccttcaacttaaggttaaaaacatggatgaatacggttttaagccaaaagagtggctttctaagattatgcaatgttatatttcactgtatgaacacaacgactccgatgaggtcacccccttcgttaaggctgtggtcaatgacgagcgttactacaagcctgagattttcaacaggtgtataagattttccactcgagaaatgttcctcaactacagaaacattaaatcattcaataatctgagcaataaacttctagagtacgccaaacaaaccagcatgctatacgacaatgctgtaaccgatgagatacccgagaactaccttgaccctataatgatggacattatggaggaccctgttttattaccaaccagtggcaagattatggatcgcaagaacattgaacgccatttaatgtctgaatctaccgacccgttcactcgtgcaccacttgagcgtgaccagctcattgagcagcctgagctcaaggaagaaatttctactttcctaaaatctttaatcaaatccaactctacttctacctaactgtattttttacctaatcggaccattttaataatcaaactcgcttaatatttttatctacttacttacattttactcatccgtatatacaaggtagtatacaagtgtgtatatgctgatatgtaaaatgataatacttatgtatatagcatggtaaaacgatatgatactggataagtactttggataggtattattggttcttagtgactgaattttacaaaagatttgcacatccgtttagatatttatattaaaaatatccccaatcttatataaaacatatacaaatatcacagccttataattacattagcattaaaagtgtttaaactaaaactggtattgatcgtcaaaaggaaccagtttattgctattattgttcttcaaatcaacaacatgcattaatctacacaaactcgatcctacatggactggttttccagccatcaggcctcctgctggcgacttcaggttatcgtaagcaccacgctgagaagcctgcataagaaacttcattgtcgactcaaaggacatttgcagcaaaggagaagtgtgttttgccattccatatcttgtaaaagttctaacgtcacctaaacaatgaaatttacagtgaaaatatgtaattaatagtatattttagagaattgtattgtattggaatttacctttttgagtcatgaaatcagctattaatgtgaggtgtctgtagttaactttaataccgtaaacggaaaagaccttttggagttcggaaactatgcatgatcgtgcagcttcaattccgtagtacttgagaacggtagccacgtcgttcatcttgatgaggttgaaatccacaattccatccttcagcataaaaagcctcttcaagttagtcccgtcacagtgtagtgtgtactcttccttgtcgtctacagtttgaaattctatcctagattgacgtatgccatacgagtctctcaataccagctgtgatatttcctgctttagcagtggtaggagatccaaaaagctaaaaagtaaaaataagtaaaaataaacttactatggacattttaacacgggccagccaaactttaaaaccatggttgatgtttcctcagaaaattccagcgatttaacaaattggaaaactaatcataagtgaaggtggttttagataataaaataactaattgataaaattaccttttctattaattgagaataatctttgatttcctgatttaattcctgagctttcactccttattctggttggggatgcagatggtgaacttaagtcatcaactcctgacacaatatcatcttgttcatctaggttcattaaattaggatcatcaggttccttatccaaatccatagaaccgtcttccaatgttgcagaagatgattgtgacgaatttaaaggcatgcattcttcttcctcttcctcctcctcttcatcagaatctttgtcatcttcattttcctgatcctctacttcatcatcatcagactcatattcgtcatcaccttctgattcgtcttctgaactttcagtttcttcttcactttcttcaacaaactcatccttctcttctctttcgtccatttcttcgtgagaatcatggtcggatttatccattagatcagcttcagactctaaactatcttctgcctcacgtttctttggaatatcattggatgagccacttgctaatatcattttcctaattctcgttgatagtttatccctcttcacaatctgtttctgcattacaaacatgttccaaaactcctctagctggtctgtcttatctgagagttcaaatggcacattgatgtccattgtcactatcatctgtcccataactcttttcatgaacgagctaagtaaattgtatgagcacactttaacaatgtctcttgtattaaaatgcccaattactttcctaaacaggttaaaatcgtcaaattgtatcgttgctacgtactcccactccttctctgagttcttgttcacgtatacgctagtctccatacccactgattgcacaatgtctgacaggtaaatcatcctcagtgcatttatggcgttttcagcgttctcagcaatttcatcttcattttttcccagaattggaactgagaaatagggtgtggaacagtgtgaagtgttttgaaggatttctatcaatctggggatacccagagttacatttgctgcaccatgtccagccagatgaaatgtgtttaatgtcatttgagttgctggttctccaattgactgacctgctatacatcctactgcttctcctggctcacatttacacttctcgtagtaagctttaaaattactatcagtttcagaacttttattgtaggtgccagtttcacaatttctcaaatacaaccttgctccattatccaaaccatcttccttttcatccaactccattgaatcgggatcagaggattttagattttttggatcatttgaccactggtatatctcattaacttggaggtcttgtaactgtgacaggtaagagcttttgcacacatcaattccatcttctccatacttaaattgtattatgttacagtttgaatctctaactgttgaatcatagcacactatcacatcctccattgccttcaaaacacatctttgaaggtatcccgactttgccgttttaacacatgtatctactaaaccttctcttcccgacatacagtggaaaaagtactcttgcggtctcaggcctgttaggaaacggtcagaaataaatcctcctgctcttgatccgaaatctccgaatgcaaaacatggcaatgttctcactgacggcatcactggcactctcttcccttccaatgtctgttgcgatagtgcacaggatatcattgcaaagttaaccttacttccctttgctcccgttgacaccattgttgcaaatccgtttcttgggaatttaaccactgtgttatccaccagttcgttaatatgactcgacactgagactatgttattctggaagaacctatcgaatgttgagagcaggtcattctctcttgggctattacacaccattttataaaacttcatgcatgtattatatgagtctcccaacttataatttgctccattattgccattcgttagtccatttttattcagtgtgcttgataattctgtagaatcaccttgtttaggttcagttttatccacatctgaatactgagccagccaatttgggaatttcagctgaaccaaattcaaattcgagtcagggggtaaatgtgcaaaatactgtaagagcaaattcctaagtttagtcacctttgaacatctttcaatcagtttacacatatatttcttaacaggttcttcaacatttttgttatcattacactttgaaattgaggaaaacaatgttaaaagaacctctacaaatgagccaaaggaatctaaaccatctaaattcccaagtttcacgtctgacacatacttcttaacggcatcataaaacggcctaaaatcagataccaattcatccaataacttttgattatcgttaaccgatccattatgaccaccgttagtgttggggagactattatccgtatttctcgacagtgatataaacaactcttgcaagtggagtcccgtatattttatcctttttagtattttattacgttcagattcagcagtctctgtaagcaagaaatcctttggactacacgtagctcctctcatttgcaagaatgacgtaaacaggtacgaaaagctgtttagcagcatcccacacactctggggccaagcagctcgtatattaggtgtgtcagaccgtatgaacttgctccaaactgcgatttgtccagcactccttgcagtaattccgaatttctaattataatcgtcgattcctccttatctccgtcatatgatcctccccacgcatctcctggtgtttgtgacttagattgcaggttaattcccctgtatttattgttttcttcaccgtctcctagtccaacagaaatattatcaattaatgtcttcaacacacacgttatcacctaaaaattatttaaattttatagatgaatgggataatatacctgtttccccgtgtatagttgttttgggtacagaattgctggttggtctagatggattttaatgtttctgttagttattttacgtgagaacggatcagataaaacctttagtcttttcgccaattgatgcaattgcacatctagtttaatatcctcttccacaaagtgtaaatcctgcttactcaggtacatcaacgaattggtgcttataaatgagttgaatgacaagtacaccaggttgaagaactcagattttgtgaaaaaagtatctctgctcgtaagtaaagctcctccttgacagtgatcctgtattagccctcttattggctggccgttttttggcactacaaattggcaatctgcatttgctatcagctgtgcttctgactgtgataagtaatcttgtggaaggtggacattcatctcatctccatcaaaatctgcgttatatgtgctacagtttacatagttaagtctgaaaatcttctgatttgtgagtatctttacaaagtgtgccataattcctggtttatgtaatgttggttgtctgttcattaatactacatctccgtccagtatatgcctgtatactatctttgttgcatttccttctgataaacctactaacagtaatttggcttttgcaactctttcattgtaggttaatgctgacaaattgtaaatctttccgttagtgtctctcagcatctttgctcctgggtatacctttggtccatttataaccagttttctcaaaaagtttacgttatatttagttacatattctggaactgtgagttccaatgcaaacttcagtggcattcccatctggtttgtatctataaaacagtcgggtgctattactgtacgtgctgaataatttactctctttcctagcatattttgtctcactgttccagttttatgctccattgtctgttttattcccggtctcgggttaccattatccatgtatgatgacagtttcttctgcaagtttaatatctggtctcttattgcttcattcaagtccttatagtcctttaggtaattatcaaattgttccaattgcttctcatcaatcttatagttcatttttgacagatattccaccaggctcagttttcctgctttcggtttcacttcattattcactccgttcaattgttcactagcatcactagcactatcattagagtttgtttcctcgctataatatttaaactgaagcaacagttttacaaactcatttgtcatcactatgtctagtagtgctgttgatctcgagtgtagtactatctgtttatctgctgttactaagggtggtctgaacctgttggctgacactcccatgcagtccatgaagaatattttatatccgtgtaaccttgattgtgggaacaaatggttcaaaaattccgactcctttctgaacaattcatctagatatggtaataggtggaatgattgtaaatgcaccatgtttactgacttccctgtttggtttaggcttttaagtgaggatgaagtgatatcctcgctgactttatttaccagttcaagcatcttttcttcttcctcatttttatcattttgttcactcctcaaggctttccatctttcatatgcgtcaggttcaccatactcatcttcaataaattgttttaaacttttaataagtttgggtggattatctttttggtgccatgatacttcaatatacgataaatcagatgaaggttttatcatcaccttgcctttcccttcacaatagctacatccgcacaattgtgcagcttcattaaaaaaccgatctcttatctcattccaaatattggaatcatgcttcatctctgtatgattatgtaaaaattcacttttgtttccattccttttattcatcatgcgttctcttcttttcaatctgtgcaaaagataattgactattttatctctctctgccgcgttttcctctcctacacatttgttaagtttaaaaacctactctcttcgttcatgcttaggattttatctaatataatcatgtcccgcatattttctgattgcgaagcctcaaaaagcaccgtgaatttctccaacgttctatgcttcaacctcaaatttccgcagtagaaacacacctacacaaaataatcactcaataacataccgcctttagtagtttgcaaagactattaatcatcattgggtgaaacagcggtattgcgaagttgatatggcctaaatgcccatcacagtttgtcatttcgttacacgttgagcacagtctgtagatctctgttgatcccatggacggatcatatatacaggactttcctgcagattcgtgatcgattctcccagcatttttgatttcagaacacgacagcgactttatttcagcactcgacagaaatgaaaaggacaatccattgacttccgtcgacactgtggattcgtagttcttcatttggaacagttcaaatttagattaaagcacagaatcccatcaaattactttatttaataatataaccataatattgagtgattctaatgagatatgagtctaaaaatataaaaatcttaaatttggtaatgtgcatctcaaaagtatctagtttattatattacaacaaatattttacaagattccaatataaattattagtatatatagatttaatacaaattaatcaaaattgatttccactccttgatatctaggaataacattcacctcatattaaccaagactattcacaccttaattcaacagattaccgtaaatttacaataataataaacttaaagcaattgtaatatcaggaatctgacaagaacagtaattaaaatgagtataaagtataatgataaagatatttatatgtaaagttttaaagggtacaaaatcacttgaagctaggtttcttaaaatgactcattaggggatctgtttcgtcaaaatccttcggttggctgttccaaagtgatgctcctccactcacacctaccggattactgtgcggtccactgctggcggcaaaaccagaatcctcaaatgttgtgcgtggagaggtaggggtgggtggtattcctgtaacaagcctttggaaccattccgatgcgttatttgctgcctaaaacattaaattataaagttgttgatgtacgtgtgataattggtttgcgaacttctgtgctcctacttttgcttttgcttctttatcttcccaccattccgggtcctgtacttgggaggctaatttcttacttttatctttgaaccacactttcccctaataatttattataaaatttaaactaacactttcaaatactcctttcgcgttatcaaaaacctgacttgactgtatatctgatactgctctttctgcgttagcgcaggctgtttgaacgaaagacccgaatgtggttcctagagaattaaatacatctgagtggatcaaatttgatgagtatggcaacttctttttcgaataatttttctttgtttctccggggttagactctgattctgttgatgtgtttgtatagtagtcagacatttgggattcaggctgcaatgccacaacaggatcaagtgctgggggcactggagttccatcgacaattgctcttaggcgtcttctgtagtaagctgctccttctgttttatatctggatgttattggcaaatccattatcttatattcgtcaaaaaatgcctttaaattggcgtttccaccgtgtttcatgtattgaagctgcctagaggtccacgaatccatcgtaatgctcttcacgaagctaatttgaagcccaaatcccctaaatttaaatattttaaaattataactaattacctatggattcccgagcatgtaagacatatgaaacttccgtgagataaagatgcccatgttggaccaactgatccgcaatcaaaacaaacgttattactttcaatggccagtaattcgtggaggtgaataatttctttgccttcggccatttttacaggcttttagttaaatattgtacgattaaaaagttttaataaacttcagacgatagtttaatccaatgatcaactttaaaaccttagaaataaaaattgtatttaattaaaaatttaatttacaaaaatataaatgaactggcagttataccaaatcttgaaagtgtgaggcatattattgttgacccatgcgcctttattgtaccattttattttacactactaactaatttacatctattaatatgttttaattttaaattttataaatccttattaactgaacatgaaacgtgaaaatgtgcaattttaaagcaaattactatacagtttacaagaggaactcttccatgagtacttgagcgcttttataataatcttccagcgttgattcattttcaattattacatctccccagtccaacaacttatcgtaaggcgtttgtgacctatgtttttacattaactctatggacttacttcattatatttatataaatatccttggatatttctgaatttctagtctgacacctttgcagtctagtttcctcgcttgctgaacatactattattggcgcgcacacccatgatagatgtgtttcataaagtagcggcacctctattactataaatcaattatttatattaattttattacctaacaattccttccactttagaatcttatattttacaacttcccagactattttgtatataatgtgtgtatgtaaacatttgttaagcatgttgagcttagatttgtcattataaacaatctctcttaaaactgccttgtctatttgtccatcatcttttaaaataatctccccaaaacttcttactagatttctatatcctactgtgccaggtaccagaaactatacaaattttaaaccaatattaccttacttgacgtcctatactatcggaatcaattacataaaacccttgtaaatttaaaaatttccctaaaagtccataaataacaaacaaaatacccaaagtagtctttccagcacctattccccctgttattgctggaatacataaccttcttcctaatacgctgaaaaatataccgataaatccataagaaatatttttaaatgataacgatgcctaaaacaacattatttgttggttatttactcatggataacattttttgacaacataccaatattgcaaagattaatagaaggaaaaaatacttattaatgcaacgattgcgattataacacaattttttgaggtaaatagtgaatggaataagggataggagtatgaaaacatccagaagaattgttatacttctatccatcaaatgctccaaacacaaattgtttaaaaaatattagttgatattcgaccaagctaaataaaactcatttcaaaatttatcaattgagctttgtcaaaatcacgtttatattcggcactatttttatacccgaaactagaactcataaatgttataaattagctaaaaattgattttaaaacattataactcattttaaaatttggataattttatatttggctcatgtgtgtttattccaaatattatacaataaataattatgcttcactggtattcattgattctaacaatttttcaacggcgctggctttattcatgatcccatcttgaactactttacattttgggcacttcatatctgtagaataggcctcaattatgcacctctcacagaaataatgcccacatgatgttactactgggttcatatcagttttccatagttttttgcatgacaagcaacagaacggtatctttaggcctttagctttgaatttgaatagttttttcaccttttcatccacttcttcacagcaactttctgaggattctgagtcatctgaatctgagcacgatgaatcagaatcttctaaatcttccgagtcatcctcctcctcatcgttatcaccttttgaattcgactgcattttcttatgccacctatctagttttttctgcatttttaatctttttttcgcctgttcttcctcccattccttctctagttgccagccagatttataatcacttctatcatgtagaaacttacaggtatcgccaaatccgcaataacctgtttctttataatctttgcaaatatctggttgatagtcgatacgaagagttgttctcacgtttgttgctgatgctctcactggtccatatagtccagtgtattttgatgccgctatactatcctttttaacgttcatcactggcttgtaggcccctttacctcgatatatattaggttcaagttctccagcaagtattttattacctatttccaggttcctttccagtatgcttctgtggtccatggacctatcagtatctatttcgtatgttgacgtggctctgttaattggctcatcattcgactaaatcaagattattattaggttaaataccagtaaatcaactatatttgagtctgatggtataaaatccttctttccattagggtttgtttgattactctgaaataattaatgattcattgaatattgaatccataccgttacacaaatcttcgaaattgttctttttttgaacaatttaacatttcccgatgcgtttaatttgtgttctaaaaataattttatacaaaaactttaaataaatgtaaaataaacaaataattacctgtttcctcattatcttccaattcttctgatttgcgattcttcaaagaagataaatccctctttttaaacatgatataatatatataatatttaaaacatattaacttttatttttttaatttgaatttgaaacgtatattatgattccttagttgtaatagtgcacaaaattaaagctctaaatattaacacattaaaacattttttattccattcataagactctttcattaattttaataattacgattttccaaataaaacagtccaatcttcgaattattttttacatcacctattcaattctttaacaacagtacccttctgaaacctttatctattctatggtatcacataattactcttgaaacattaataagtacatatattgaatgtgtttctgttgtaagtgggttatttctactcttccttcttatcctgaggttgctggtttgcatcaattactagattgagcagtttcgtacactcgtcaaccacagttgaccacttgattttgttttggatagattctctgcagtttttcttaataacctcacactggttaaacacattcgagtagatatcatcctggctaatcgagttgatgcttgaggccaaatcggaggattggaatacatcttcgtagctttggtatgaatcgcccatgatacttgatactgttccaatagcattatcgtttgattcaatgattcgagtgatgtttgagtcattccacatgtttacatttcttgtcaccaatgactcatttctcttatcattttcatagttgacgttgttgtcctgttcatatacatttaagtcattatcgtaatggtcattgtagggattcaatccgttattgtagatgcttaggttgttgaactcgttcagattgttccctatgtgtttgtcgtacaacttgaggatcgagcagttcctttcactcatgttgtcatctgggaattaattaatttattattattttatatacatttagttaactattttagaaaattttcttttcaattacctgtgtaatctacttttggcattgatattaacttgtaccactcatagatcgggtcgttttcgcaattctggttgttgttgtcaattgagttgatgcttttaaatgattcagtttccattccttcagcagtatttccaaagttgtttgttatagtgctctttatgtctcttttacaacttccatccttgcatatccctccattgatcaagtcagtgttatttggtagcaagtggtccttttctgttgatttgtttttccacttgattgatgaccatgatttaatgttaccagagtcatacaaatctacagtcggttctttaattccttgtttcttacctttactttctaacttgctcaatgtcttttccagggctttggcgcccttttccttctggaaacagcctactgagacgtttcctgaggtgattgacttgatgttgtccaccattctcacgtgtgcgaactccggaatgtcgaggccgaccttcttcggtagcacgtattgtttcggtactctgtattctgccaacccgtggaccaggtgacagtagtacgtcttgcatttgcccaacctgtaatctttgcacacttcagttttatacaccagtgggtgatagtgtatctcctcgtatgaatgtgcaaacgaacagttgtttcctcttgggcacgagtttcttattactgtggttccttcgcccagctcgacgtctgggcagcattgcggtatgtatcttagtattgatgaatctctcaggtagaatgggcatctacgtgcccagtacaggttatgcgagtaattacacctttccaccccaaagtcacacttcatagaagaggccagagtgcacacttttgttcggaatctttccaaatcctcttcgctaagtattggcatttttgcttgaatcttaacttgttttcagttaatgtttttatactacaatatgatttgtgatttacgatcgatattgaatattttacaaaactgcattgagaatagaatttacgaaagtagaactactttagattgtcaagttgatttcttgacaatctggcatccaattttgttcttattggcttgaaaaacgtattacgttactatttttaaaattttatgtttgaattcctctaaactaaaggagcctttactttactgttagatttggttttgaactatcaaaaatgatttttttctgtttttatctttcaggtgtcaacttcattacttctgaggggaggcataatatacgacttcaaatttcggattaaaaaacgaattaaatgggataaaaataaaactttaaacaactaaaacaaataagatcaaggagttttcatttgtttgctaataaatctaattttttgaaaattgaaaaataaaaaactccagcgatatggaattgacaaatgtaattttttgtatatattaaatttaaagaaaagaaaagttatttaatataaatataataaaatctaataattaatatctctgaaatgatttaaactaatgacaggcgaaaacaactggaaattttctgatggtgtgtcgttgctgctgcaatgatcagaaatatatagatcttgtctgtagatggtggatgaattaaaaaattttgataaaagaacagatttctgggtgtccaattttagaaaaaaatttatctccttttatattatcattatttattatgaatataaataaaaaagttaaaattatattacattacattatgggcttaatgtttactatgatgacatctgttaatggcttatcgtccttgtttgtcggaacctatgtgtgtgtgaggtgaatctttatttaaaaaattacgtgttgttttgtatattcctaccttttctattgtttgtactatttccattccgctcgtcactcttccgaatactgtgtgctttccatctaaccagggacaagggactgtcgttatgaaaaattgggatccattagtatttgggcctgagtttgccattgacagcgtgaatggtctgtcgtgcttcagtgacgggtgtatttcatcttcaaactcgctgccccaaatcgactctcctataaaattttatatcattttacgataaaaattttaattatttacctcctgttccatctcctgttggatctcctccctggatcataaaattttttataactctgtggaaagtgcacccgttataatatccgtttagtgagtggactgtgaagttctccactgtctttttgcactcattcaaaaataactttacatgaatatcacccttatttgtatgaattatcgcctccttagccagctttcctcccttgtcgacaactgaaaaattaaaattctcaggggaaaatacctgttttttcgcccttctccccctcggtgggctgctcactatatacatctcttgtctccatttcttcatcgtctggatccttctcggtgaaaatatatattctaaaaaattatttatttatgaattcaaaaattaatataaatattcattactttgacttttgaaatgatgtcgttatcaatattggcggcaacacatcatcgtttgagtcaattgacggcttataacgtttctaataacaaaattaaagagaattattaaaattttaaaccaaataaacacaccttatccaatacatgttgtaatagagatattttcatataccttaaagacgcttctgatttaccaatcactctcaccaactaaaatattgttaacatcaacattcaacacttattattcaattcttaccttattagttactatattcacaatcttcactcctagcatagatgggtatattagataatttgaggaagagtcaaataacaaattcatgtattccccctcatcttttcctgctttgtttatttcgttctcaattgactgtcttctcaagaaatctgctggatcaaagtgtaaaatggactgatttgggtcagtctgcgccactgagtacattgttactgtctcgtcataaactctgaatagcttcattgttgcgaatcggaatattcttatcatgccatcatggcaatacattgctactaggttgaaatttggcgataaacacattgacacaacatgagtattatactaaaattttataatgattttgtttttacctttcttatttcatataaatctgtatcactcttcattctcactctgaattcttctgaatatttggggaacttaaatgtttccacatcgtacaaatctacatcccctaacctgtttgccgtcaagcacactccagcttttgggttaaaaagcatgatgtgtggactttttgttccgatttcaaacttctggaccatcgtcgattgaagtgtaggcttaaaaatgtgtacttcttggtttgaatttaatctaaagcaattgataaacttaaactcttacattgaaacaactggatgtggcgacgtttctgatgttataaactccagacaaatgggtacaaattcaagttttattatgtttacaaggtcaaacgactggaagtcgatatgtttataagtcttatcgtacgagatacaacctaggtgaagtccgtctagtgaagatctcatctgtattatggagcctataataacttatcagtttagtataatacttgtatgtgcagtcaaatgttttacaaactgaactccatctgtatcgtagtaccagaacttaatgcatccatcatcactacccgttgctatgtaacgggttgtttggcttgaaacaactaaattattgttaagtaatctattaggtagtaccatgttttacgaatgttctatgtgtatagcttctgctataaaaatttgcaaacgggaagtggcttaaatagaaggaatcatcgaactcaactaaagaagatttataaatttattaaattacccttctttttcttttttggtgctggaataggggctggtcctacaagtatttattataaatttaaatataagtaccgtattcatcttcgctagaagattctgagccttcgtctgggttaggcatatataaattacaaaaataatgttaaattttaatattaaacaaatattacaaatttatgttaacaatagtaaatatatgggtcttcaatttcttattcctgatcatagcacaataattaaatagtaaaaactaattacttctttaatattattttacacattcaaattaaactaaattaaatatctaagtaaaatgatagttttcatttaatttttaagaatattatattttgtttccattgatggtaagaatctttcttaacaattcatatcacctttttaattaaatcaataacattaaaaatttttaggattctcaaagggacttgcgtatcggaatttggttttcaaaactttcagaatcctttagtaatttaaaatctctaattaaacaacatgaagtatttatatctggtgatttcgagtactttattgacaattatgataacttactcccggatgatgtttacagatcattccgccatcttaatgatgtgatagttttaacagcaaatttaccttaccttacacattctgacatatcattttcaaagagaccaacgggtattgatttctatattattatacaaaatatattgttaaataaatttacaatatataatttacagacgtggattcaccagaagataaaataattgacatatcgcctctcaggtcattcagcccggtgagtttcttatataatctgcctaattataaaactaaatattaagcagtattcaagccctaaatatgaactaaatgatgaaggatttaatgactccgtgatgggagttgcaatagtatttatagttcttactacccaaattttcaaaacgaagggtttagaagatattaaatcatatatttctgggataatggaccgattcaaggttcataatcaaaagataaagtttgttttggtgaatcatggaataaaagatttattgttgacaaatcaaggcagccttccgagatcatcaaaaggagtccaaaaggacaaccaatcgctatcttcaaccgtaaatgagcttggaacttacttattagtctaccacaatattgatacatttgaaactgatgataatggagacctggtatgatcgcattcactaactaataaaccataattgttaggcaaatatcgtctctctctctgctaagtctctgagggccagctattcaagaaggagaactacaaaatttaaatctaaaaataaccagaagctaaatgatgaaccggaattgatcaaaaaaatgtacgtttatatacaccttccaaaccgcttaataacgaatcatagatggatgtcccagcttctgcaagtgccgaacataggcaaaaccgaagctatcgaactaatgaaaaagtaaatcaaaataaaatattttaaacgtttaggtatggaaaaccatacgaaatgatagaatccttgaaaaaatccgaggggaatttttattatgatttaaaaaacatagaagtccacggaaagaaaagaaaaacgctggggaaaataacaactaaaaggtttctaaattatgaatgtaagatcaacttttttttagattggcaacactatattcgaaatcattgctgcctgatcagattctataatttgttataacttaactaatcttttttaataaattaatacatttgaaaataaaattagtctatatttaatgtacaatagcaattttcttagttttttctattattttgtcatttcaatatcccaacacacaaaaattgagatatgttggcgatttactaaatggagttcaactccacctgcctatattcatttctagtagtatgtgcagtctcatccctctcagtgtccatcggaactggagggggactgctctacgtcccaattctaggattactataccatgatgtcgctcttggagtgtatttgtcaaagatttcaatcctaataacctcttttataggaacaacataccatatatgcaatgatgcatatttgttaataaagtctagtaaatacaaatctgatgaagaatcgcattctgatttaacacctaaaacagtccagcccccaagggtttacttcgttttagctgcttccctggttccatcatgtatagtaggtacaaacttgggaaccaggttccactttttcgcaaagagacacctcaagatcttactcacatctgcagttgccttctccatgttagtcacatttttaaagttgtatttaatatataaaaatcgcaaaaataagctaaatttccaaccggaatctaaaaattttgaaactcctactatagaaaattcaaatgctgaagtcgttagcaaaaatttcatatcacatattctcgagccatacagtaactctagtttacatacaattaaaatgaggtccatttcactcgcaataattttattttgtatcatattgtactatatagccgtgagatttgaagactctttcacgccgattcctatattagttttgctctgcacaattggagtatatttttcaatcaagttgaggatgtcattcaggttatcaaaagaatatgacgagacaacggactctgacagcgacgaagaaagccaagtaaaagaaaaaaaggaaagcaagattaggaaattctttgaagagggaatacacattattttattaaatacaatggtagcgtttttctctggattcatgtcaggcgcaataggaatcggctcagggatattccttgttcccctattgcaatacctaaatgttccaccactttcttgctcggctacgtctaacttgctgacaatgtcaatgtcgatagcgacgctatcgagatttagtttcaaaatagacttatcccgagaaatggttatacctccagtctgtggatcattgttaggtacttctctatcattatttttcataaggtccgttattcaggacaaaatcacaaggttatttataaacgtcactcttcttatatattgcacttcatccatcattgtaacatgggcgatttaatactaaattacaaaattttgtcacttcaaacattttaaaattcacagccaagtaggttaaaatatctgcgttttttccgaaaaaaggaatagagattttaatacacgtgatttaacgagaaatttgttcgtttaaatggagattttaatatgtaaatttgttatgaacatttatattttataatatatttatttatatttgttaaatgattcgtagttagaagtttatggtgtgttatacaataacaatgtgttaactcactttaatattcattatatataaatgtaaatatatagtattatgtttattataaccattttttgtaaaatatatgtaaatttcttggtttttatacaactgttttccttggtatcaggattccgctcaagtttgtataatagattaaacacatcatttgtttcttataatttccataaaactaactctttaaatggcaactttaaccaatgtgatgaatatttagatgggtttgttgttcctagctcctttcaatcccacgagataagtaaattggattctattgataatgttcgcacttcaacaggtttgattctatatttgtcatttaacacttagattgtaaaaccacaaaatctttagaagaaaattttgtcacaatttcagacttaattcaacgcttaaataagtctaaagaatccaacacaccaataggtgtgccgtttacagtcaataccagagggtttgtgcaggaaattagacgtataaactcgcaaaacctatactttattgacatcaatgacggctcaacactggcaaatttacagattgtagtgaatcaagctaataattttaaggaattagaatcgctgaaaaacggagatcatctctatgcagtaggaacaatggacagaagaagaggagttccttccgaaagatcactatcagacttcgatttgtacattaatcacaataatccagaacataagctaaaaatacacaaatattctgaagatgacttggaaaatccagttatcccaaatatagaatactctgacgaatatctgagaaaatatacacattttagatttagaaataaacagttccgttcaattatcgccattagaagtgctataaaatcatatattcaccaatttttcacagtaggtttaaattaaaattttaatgtttagagtaataagttcactgaggtggatacgccctgtttaactctcatgaattgtgaaaatctggcaccgctaaccgtaagttgcctgagtaataaaaacaatttagctaaaatcaccatgcattggaacaaactcggattatgatagttatgaaaatacagaaaaggtatctaccatcaattatttaatttatagaatatccctgtaaatttgagttcaactggacaaatggaattggagtttgcctgctatggtttagggaaagtttggaaagtagggccttcatttagaggtgaaagatcagatgttagttttgacttgttttcatcaatattaaccttaattgtgtagactataagacatgcaaatgagttttggatgatcgaagctgaaattccagatgccacattaacggtacacattagttctattataatttatagggaatgattaacttgattcaagagttgattagggggtgtgcaacatatatacttcaaaatcatgaagactatgtaaaatatttgaacaattttaatgataaatacaaagactttttagttcatttggtacctcttagaagcatttaattgatttgtagtcaaatgctaatataaaaatgataacatatgaagatgcagtaaggattctaaatgaggtataatacaaaatttcactattcattaatttagaccaattctggattggataaacaagataaggtgtttgaatggggaaagagactttctgaacctcaggaaagaagacttcttaaatattttcccaatgatattatcgcaatcgccaactttccagaatccataacacctttttacatgaagtaatatcagttatatattaaaaatgaatataggtctagtagtggaactgataaatctgttgagagtgggaatttaaagaatacagtagaaaattttgatatattggcgccatttggatatgaaatagcaggaggctctattagagaacatgaatatgaagttttgaaaaggtattgaatgtaaaaatataacattatgtaggaaggtgaacgaaaggaaaattagtggagaagactatgaaaagtagtttaaattattaataacggttctttagatacttgaatctgagaaagaacgtttatttacctcatggaggatttgggataggatttgatagactggtaatgttgatgacgatgaaggaaaacatcagagatgtaacaccatttccagtgactaaagtttaatatttaatgtatattatggcctaacatttataatatattagtggaagtatattaatggaatgtgtactattatctttggaattatttgtataatttcatcttttcgttgaaaccagtagttgtttcatctaccagttccagaaatggcatgttatctgaaacctaatcataataaatcgtatggacatacacttgccaaggctttttgttgattaattatgttctcgattagggaaagctcctcatcaatggatagactaattatatttatatgaagttagtataccagtctttcatttttaaagatttgttaaggaaatcatgcattagattgttcattctgtaaataaattagtaatataaaagtgcactctatatacgtgtattggaccggaaacactcgttactagtaaataataagtttattgagataaaagtgtaacctaggagggagcatccttgagaagttgaaagaatcaactgggtctgtgttaaaagttttatattgattagtgaaaggactctctataaatgatacgttagttaataagtatacgatttctggaaagaaaactatcagataaattgttcctagtggaattttgattttgtgtaaagtagttttcagaattgcttggatcaaataagttattgtaagataatgaaaaggaatttgaaggaaaatccatgattaaatgcattcaatacataaaataataattaaaataaggaaaataataaagaattgtttataatggaaactggagaaaattatttaaaggaaacccggaaaataaggaaattttatcaatgaaaaatataaataaatattaaaatcaaaattttaaaataatgaataacagttagtttaaaaaatattttgaaattataaaataaaaacgaattaatagtgattataaatattgtgtcaataaatttattttaaattagttagcaaagttattttttaaaataaaattatttattatatttttaaattaatatttcaatatatttaaaggaataatgtcattttaaattatattatagcattattaattttagcattttatttttctgatgattacagatgttatttcaattcggtttttattaaaaacaaataaatttcaaataaattttttaaatggaagttgaggaaaataaagatataaatccacctgaatcacttgatcgcaacccagaatcatcatccacaacccattcatcagacgtggagcatgaagatgataaactggaacaatcgagtttaaaagaagaaagaaatgaagatttagaagaacaaattgaaaaaaattgcgaaggattatccttccatacagctgtcagttcagaaatccatgaaattgatcataatttctataataatgaaccagaacacgaacacatgaactcagctgaatcaaatgaacatgaagagtctgatcagccctatgtaatcttgtcagaaacaaataatgaactgaataaccatagcatggaggaagtagatgattctctccttaacgactttgaaaggaccttgcaccttagaggtaatttaaatttgattataaataatttttagatattcacaaggggaaagatacgcggtcaaaatcgtcaagccagagaacagaaacatcaaaatcaagacactcaagtaaatcacatgaatccacagaaagatcaaaaaggaaaagctcaagaaggtcgcagcagtttggaacgagcgaaaatccaatagatataacggaaatgacagtagattgcggaagtttgctagagctgtatcaaaatgattattttgacgcatttatgcacatgtatcacctgtatcataagaaggagccaggagtacacgaatatctggtaaacatgttatacacgaaacgcacagacgaagagatatcattttacctgccacaattatggtaagtatatacctatataacttaacaatttatagtcaattgtcgatatcgaagtatggaaaatcatcactgcatcgctttttattggataaagcctcagtgtcgatgcacttcgcacttcaactttcatggttctaccaggcggcaatagacgaccacatcccaagtactttttaaaaatcatataatttatctttagaatgtgatagactgacgcagaagatgacacaggatacagaaatggcagtggtaaactcaaaactcattacgccagtatcattctccaggccaagttcagagatgtcaatttcagaaaatacatcatttccatgtttattagatagaagacttctactggagtcgttttcaagaagaaaaacgtcacaaaaaccagacctatataacttgtttacgaacgtaaattcattacttggagcgaagatcccaacctcactagttcacaacacattcatgctgtccaccccgacgtcgaaagtaaagttggttggagtacacccaaaactagggaacgcgatagttttagaaacacacccgatactagattacacacaggatttacacttggagcttcagaagctgatgatgaagcagagaagactgaattattttaacacgttaaacaactttgtcgagttgtgtatgcaaaactcgtcactattgacaacggaatctaagagagatgcaagagacccactgttaagagtattcgcaagtgcattaaacgagtggatgctgctgagaagatgcatagtcgcagcatatgaagaaagcttcgcctacacaggactctcactcccatttgactatataaataaaccacaaaaacactacatctataaccttaacgggtatagctcagtacataataatgaccaggctcttttgcagatattaagaatagtggagagtgagactaagatctttttttcaaggaagagagccccttttgtgttttatgtagaaatgggaaatttagatgaggatattgagttaatatcctacaactcgaataaagatagagaaacgggaatgaaagacttatacgtgtttgaatcaatagtaaaagatttgttaaactatgaattattaacgccagaacaggttgaagcaattaagaacccactcgagtgcattcgatacgcactggatatgctaccccaggaatcgcttgaaagatacaacatcttcgtggaagataaagcgaatacagattcctcatacaactactcaaagtcacagacctcagatgattctttcgcagtaagcagtgccaacagctcatatagtaacactgatgagaacccagtgactgaggtggattctctgtctgaatgcgagtccaagtcaaatgaaaataccgattatgtaagaattgatccagattcatcagaaactagtcctaacttagcaaactcagtacaaaacggagatacacatgttcaaaaccaagttccagacactaatactccaaatcaagttggggatactaatacctcagtacaaaatggcgattcctctccaaattctaacagagattctacccctgtagacaaggagtcttcagattcaactaaggaatcgccacgtgatggagatgctaaaacactaaacgtgaagaaccttagtccccaagaggttaggaaaatagtttttgcagaaacttttgaccagaagaaggagaagataagaagaaagtcgccatacggaaacttgaaatcgtgggacctacacgccttcgtgattaagggaaatgatgacttgagacaggaaaaaatggcaaaccaggttttggagtcgtttagaagaatattcgcaaaggcaaacctgccgctatggctaagaccaatagagattttagttacaggctcaaactcaggaatcatggagttcctccacgatacatactcagtggatgtaatcaagaggaaatttaacgcggaatctttggctccagttttcgagaagctcttttactctaacatttacgaggctaggaagaactttattgaaagccacgcggcatattccatagtatcatatcttcttcaagttaaggacagacataacggaaatatacttctggatccatatggacatgtgattcatatcgattacgggttctgcctctctaacttcccaggaaaactaatcagctttgaaacttcacctttcaagctcaccaaggagtacttggatgttatagagggaggaaactcggataactttgtttacttcaagactctcataacaaaggggttattggaggttagaaaacatgtggatgaggttgttctcctggttgagatgatgaccacagctaataagatgccctgcttcctagcgggaaccacttacacaattgagatgttcaaggaacgcttcatgctcaaccaatctgaagaggcatgtataaggaagatcacagaaatgatagatgcgtcggtaaatagcttctccactgtccagtacgacacgtatcagaggctcacaaacggaatcttgtaattcacactataatcacgttaattttttacacattttattttcagttattttttattatgattatttttaagtaattatttctgatgactagggagcagttggatgtcagtgccctaagagatatcaccgacaaactctcatttgacgaaatcgactccataattgagaatttatcaacaggaaatttagcgagtttcttaaacaatgaaaaacttaatgaagccctggaaagagacgcatatatcatcaacaacgtgtttacacagacgggaatcacgaagtcctgtgaacacggcgttaaaatatcatcaataatcaaacacaaggcagctaaactcaatgaagccacttccttagagcttttggatactattttaggcatatatttagataatttcacaacttcatcaaatgaacagcctattaccatttcttcgcaggattactcatccaataatccacttgacttcgttctcctgtccaaacattttccatctggagtcttgtccttctcttcactatcctgggataaccttcccctctcagatctaattgtaaatgagagcttatcgcagcagaggcagaaacgctcagtgacatctagcgtttttcagtataaggaacttcacactcttagagattatgaccatagactagaaactaaagagcgtgttgagaagatcaagtcgcttctaaactcgcaaacttcaacccgagctgttagattttgggagtttgttctagatcgtgaccccgagaatggcttcaacagcacttgcttcaacctatattccctaacttttcttgctacaaacggcgaagttgagattttcaagggttctgatggcgagataatgatcaaggtattttgacttttagtttaaaaaattgttttcaggctagagacagagggagtggaaacagagtaaactttcaatccattgttactggctggtgttatgaccaatggtccaagcttttagaaaaatacaaataattaactgtgataggagaaattaacattttaatgtataatatttttatcagtaaatttacaaaatcattttattttctttcaagtattttaaggctagttcagttgcattctttgattcttcactcaaggatatcttaggctgcttcactggcctatctgaatgtgttttagtcttattctttctctttttagagtcacttgaatcttctttcctgttcctattcatcaactctgtaggtttcatgttcaagcatagagatgttgcatagtgccctaggtgtaaattcctgaaattgaacactttccttagctccttcgaatatgtcttgtaagatctaaaaaggttgagtaaatgtataataccttattgatgacatgaaagactttttagcaagatttagaagaccatcatctcctttaacgtccatgcagaacctgtttctcatgaacccaaccaagtctccctagacaatattttttaaaaataaaaatgaaattaataccttaaactttttcaaatactttggacagttcaacaccttaatttcactccaaactgagtcctctgacacctcatcaagtttcattcccctatcattaagtagtttaacaagtcccttttcgtgtttaattaaaatcagaattgaagttcctgaatcaccgattctagcagttcttcctgatctgtgtatgaactcatcaagttgttgtggagggtcatattgaatcactctgtcaacttttgaaaagtttagccctctcgacgccacatctgttgatattagaattgaacattcagagttgatgaactggtccatgtaaggaaacctaaaatcattattttaaaattaaaattttttttaggaatccatacctttcactcgactccatatcaccgtggagtttgaaaattggaactttaaatatgaggtttttatcattcttttttgatttgaaaccgttatttaataggtgttgatcatcggagtttgaaatgtattgtccaaaattccttaaatggttagtttctttgttatctaacttgcgtaaggttggccatgttaacgacttcaaaagcatataaaagtagtttacagtatcacagtttgaaacgaaaataataatctacaatttttacaaattttaaaaataccttttcacggttactaacaaatttcaacaatagtgagattaggaacatgaacttgttgttacaatccgccaagacgtattccaacctcagattagttgggatttcactgttttctagaacaaattgttttaaaatatatgtaccttcgcttaagccaatgatttggggtttggaatcaaaacaattttcaaccaggttctttactctttccgttattgttgctgatgttaaaactatttggattccagaattttctcgatttgacttcttagaatcgagcaaatagctgtgtattgtccttattttactttcaaatcccatgtcaagtaatctgtcagcttcgtccaagaccaacatctccaggttgtccaatttaaatgaagacgtgctttccatgtggtccaaaacccttccaggggtgccaatcactactgttattccctttctgatcctggccttttccgatttcctactttccccgcctaaaattaattataaaaatcaatgtttacctttaatacaagagactacaatccaggggaagggttttgataaatcttcagtaaccttagaaatctgaaatgagagctccctagttggcgtgataatgagaatctattaaaaattgcatggtaattaggaataccttggttccatcccttcttgtaatcttcttattatcgggaggagcaatcagtctttgaagagcaggtactataaaggtcagtgttttccctgttcctgaaggacttcgtattaaagtggtggctccgttcaatactttaggtatggaacacctctgaatatgagtaattttgacaaatccattagcttctagtgatttaagtagtctggtgtttaaaattccggaaaactctgaaaaatcagagacaaatgttgaagaatctgagggtgtatgctcatacttggaacatacaggatcagaatctctatttcctgtattattatagtttattagacgttctttgcgattagggtgggttttggtatcatgggttacattttgaaatttgtaggacagagttcgcaatttgtggagcttgaaacgcgaagatctaccatttatgctaatcataatactatattattaactataatcattaagttaaactattggctattgtacatggataaataaaaaataagcgcgactaacaagtagttaaacaacaagaatccctataacacactatacaacaaattataacaatgatcatagttttaatatattttattctattaaccaaataaatcactagaaaatttttatattattgttaattttgttttttattatagacacattttctgttaactgtaatcatccactatttttgtaagaattgattactaacaacgatattttgtttaatataatatcaacaacgatttttaactcttatggcactcaattgcatttaacatttctatgatgttaatattcccctcgctgatccattccatgtattttacaatagtacaataacacagcaacacaaaacccattttttgtatattaaattgaaatatttttgttttataaattcttctgatttaatattaatattgtcgaagataaagtgtaattttaaataataatttgttgtacactaaactttgtaattctcacttggatcgttttgtagattatttcaaattgaggattctgtttaaacgaaaacatttcgtttatgttaatattcttctagaaatctattctagccgtttgtaattaagttgtgtgtttcccctgtacaactcaattatatgtgattcaggatggcaagcccttcactacttaacgatagtagtctcaaaaacagaccagtctcaagactactctcactggcgaagaaaaggcacgaaaagtattcatttgagactgaagcggaagcttcgaaatcagacgtcaagtgctacgacaaggtgacctcgacacagtcgcagtttacattcgagaacgagccactcaccgagtcaaaagcagatgtaaagtcaagtgacaagctcgttgaaaaggaaggatcacaagtttacgaaaactccccgactgtagcctccaaggccgacttcaagtcttacgactcagttgttgaaaggccaggagactatttgtttgaaaacgttcccatggtttcatcaaaggctgactttaagtgtggtgacgccgtttctgaaaaatctggagaatatctgttcgaaaaccagccacaggtgtcaactgccaacgtcagagcatcagataccttgttcgaaaaggttgacagcctagtatttgaaaaccaaccccaattatccaaggcctttgctaggtcctcagatcaactagaagagaaaaaagaagtcgaggtatttgaaaatgaacccgaggagtctaaggctaacgccagggcctctgaacagttagaagagagaaagcaatcacaagttttcgaaaatgtaccggagctttcaaaagcaaacgcaagatcctctgaccagctggacgaaaaaggcgtatcacaggtgtttgaaaatgaacctgaactatcaaaggcacacgcaaaatcatctgaacagttggaagagaaaagccagtcacaagtttttgaaaatgtacctgaagagtccgtggcccacgctaagtcctctgagcaattggaggagaaaaaagagccacaagttttcgaaaatgtaccagatgaggtctcaaaagctgatgtcacatcatatgatccttcaccggatctctcaaaatcccagacggtgttcgaatgccagaggagcacagtaagtactgccgattttagcgcattcaaaccattggagcctaaatcgcagtgtgttacaacatttgaggctcaaacatcacaacacagcactgcagatgttgtgtacgacaagttcgacaccccaatgaaggaactctctgaaaccatgagcaagtgtagactcgatgagtaaaccgttttatagaaatataatattcaatttatttttattatatcatacactttattaatgattcatgacttaatgcttaaaatttaacagtaaatcaagtggattccgacatacctgttatcgcgaaaaataaccttcagattactttcagatattttaacaatttattgtaaaaaaattttaaattctataaattaaatatgagtttaaatacgtatttgtcatatacaaatgtcatttataaagaatcaactggattcacacattatccttaacgtcgagagaattgatttcaatgtaaaaataaaaaatggtattttacattttaaatatgattaaattctttatatatgcatcttacatataataaacttgttttagcgaaccaattccatggaattatcgcagaagccttcgaacatcttaaagggcttgatcatttaaacatttgtaagtatataaatatgctaaggctggaagggaatacatacctactcttttcggaaggttattctctaacactaagtgagatatttaacacacattgtgaagaatatataaaatctaacttttatacaattgttaaccagattctatttggactacagtatctacactcttcaggattttatcatggaaggttttcattggattctgtgtgtgtttcagatgaaggattggttaaaatctccggatatgggaccaactatttaaataaagtggtaagctatatgattaggcaagagaataaagaatctaatcattcatacgacgataatggatcatatcaaaattatgttatgaacccgtttaacaaggatgataagaattatttgatggactatgttatcaactctccatatttaatcaacctgttaccttatatgcctccagaacttatattttttcacaattcagaaccaaaaggccatttattctggtttaacgtagacatatgggcactggggatttgtgtactttttattatatcatacgtcgtttcatccagtggtttgtataatgtctcagatactagtaccgttaatgacgaacagaacaataaaggtatgtttattaaaattatgaagattatatcaggaaacttcaatactaacgaaaataatagtatttgtaaaagggggccatattttgaaaacctgaggaagctgtttaattcagacgaatcgaaatcagaattcgtagaatctttcttttttgtaacatatttgcttattttaataaataaattcgagtcaacggatcccatttcggcacttggtttagatattgtaaagatattaaatgacaaattcaaattattgataaaagaaaatgaacccttgggtgatgtaggagtggtttcacagatttttaataatgttagtactaactattcagattcaaataatactgaaagagttgaagaggagattgaccatgataaggtaaaagtacaacctgactgtttagttgaggcagcgctttctctatcaattggcatcttaacaggaagagaagttttgagaaatttgatatcatttaaccagaaaacatttagtaaaaattctaattctgagtctgttttgagagatttgaattatttattatcactggtaaatgattgtttggtaataacaaaccataagaggcctccaataatcgagttaatcactaagaataacatattgaagatgccaccaagaatattgagttccactgaaataaagtattcttggtttacatatagagaaaaaaccgaagattcgcaatcaataagtgatttctcagtaccatattcagtagaattactgaaagattgtcgattaaatctttcggagtctgggttctttatcagccaagtagggttggagaatgtactatactactggacattactaggtaatgatccccaaaatacaataccatttgaatataagaacagaataaatacgagtgatgaagaggatacatttaaacaatctaattctgaagccaattctaaaactagggtaatcaatgttacatttagatattatgtttatttaattttaataatcataaatatagactttggagtattttagaagatataaagttgggaaagtgtttctgggagaacttatcaaccacgttaaactggcacacctcttccccatggtaattgaacatcagcttagaccaacatgtgtgtatgcaagacaacactgttttatttaccagatattaagaatacgacgttttaaaagactattaaacaacccagtagagaataaaagacaagtttttgcagaagcaattatagatattccaccccctttgagaaaacaaatttggtgcaatttgttagatgtcgtgtatagaccagctaaaaaagattgtccaatcaattcaaactataagttcgaagcattaccttcggatatggaacaaaatcttaatttttacgttagtttttagaaaagttaaattttacttcagaacaatgacctactctactcaacaaccaatttgaacaatctgttgtcaagcatagaagacttgaaaaggaagattatacaccagcaagttccgaagtaattttagataaatatatataattttttagttcaatatactcatttgcaattccgctgttactgttgtaccacaactctaaagtatactcaacggttctggacaagatgttctccaaatatttaaaggtaaaattatgaatttttaacttttgtaggaattctactcaccaactggctcattcgtgaacaattatctgagtgaatttagtactattttgaatttctttgatcctgaggtttcatatcacttgagaaccataggtaaatagtgatttttaatatgtaaattgttcaggagcttactctgattcttatgcactaccgtggttcatgtcgctgttttcagaaaacacctcggtagaccagctgtacttaatatgggactcaatactggtacacccgaaacaatacataaagttcctggcggttatgatactacataacataagggagagaattctaggtaattttaatttctaatacaaaagcgcatattttttaggaattgctgatgcaagtgtggcaatctcgttcatttcctgcgttgttgactcacttaatgtccctatgctgatgtacctgacaacacacatgtttaacacatggtttgaggttatgaaccctaaaacagcaataaataagcacaatatggtgaatactcaggaaaatttaaatcagagtgaaacaaacgaattgaaatcagagtcagatacttttacactagataagaacacattcgtctttgtatccgaagagtacccattcgaaagatgttttaagctctcaattgatactttctcgaatatttttaacaactgcataataatagacctcagatcaatagaatcatacaatttagggcacatcccaaagttagcttattaaactcaattataattttttagctcagtacatgtaaacaaagtcttctcagctctttctgaaagtgataagaaagtaggatcaatatctctccagatattcaatactgaaaataacacagcagttgattataatgtgagtttcatagctgttctagttttaacatatttagagtgttggaggtcaatcacaggtgatttcaagcttaattggacttagaaacacaactaaaacaccctggttacacattaattcccccgagagtaataaggtagtcctggcagccggagacggatatgataacgataatgaaatgttatgcctacagagacttatatttgagttcagactacaacatgtgtgttattacagaattaacacagaagaatggccgaaagtgtttacactctctaaaatctaacttttaatgtagtttaaaattttatttatttatttactgcttttatgtgtaaattcccatccttggttttacaccttccacacattattaaacatgtttttaatataatcgcacaaatcagtaaattatattattttgttcaataaataatattgtggtcataaaaatgccaagaaagccaacagaatcgcattcttgcctaatagtaacacgtaatttgaaagaaagatgattccatgagttaatgtttggattaattcactaaattcctaccttctagccttaaaaccacatcaaacaagatgtttgattcacctttgtatattatcttctggttaattttagttttacccagtttgtgcggagtcatctcaccgaataaacttagtttcgtatcgcatttatccaataattggtataataaacagtattccagttatcagaaaagatatttgaagaatcctgagtacattgtagctggcactcacgaagaatggaggaaggatatggctgataccgttggagtttggtcaattttttatccttatgatctatacaaggcagaagctttcttgcctggagcagatattagacctaatttgttatttctagatatcgcaggacgagttcgtggtccaggagactatggtagtccagaaggatgttacattttggattctaaggaataccatcaccttgaggattccaacaaccttgtgcactctagaaggttttaaaaacactattacaaaattttatttagatgtgtaatggttatgtatggcagagtaagatattcaaaccttaggttggtactggcaggccggatgttctacgctggaggcctagctttagagggtcttgatccactccttaatgctacatctgcaatttttctaggacacacattcttagaatcatacgtaaaacattagaatattttatctataaccaattaaaccaaaataacaatatatttagaaaaatgaagtttatgctgagaaaatgaagacattgaaaaggaaagtctcatttgtaagtttacatgtttaacaaagctgtagattgataagcagggtaatgaaattaatcctgtaaactgggaataccaaaaattagatggactgggatcatctttcagatggatgcatggtaacagtaaatggaaactagttgggccattcacatgctacaaaagcttcggtgtaaattataatactggaagcgataattccttctttcctgagtatgctgatgatgccatttataacgttttcgaccctctggaacacttttgccggaaattcacaagcagggagtaccttgaagatgaagttagaacaattataagatcagttctaaaaggtagcgataagatgaccaaaataaaggttgaggatgaaaactacctaaataatctggaagaagaggtatttaaaatatattattctgagttattttagttggttgctcttggggaccaaggccctgattattatagaggaacctttgaataaagtaagaacagtgttaaatagatatagtcaggaaagataatttgtaattgtgggagaatatttatatattattctgttttaatctcaaattcctcatcactgctttgttcttcaacccaatcctgataataatttgatgtttactaaacttacacattttacatcatcgtcttcttcccctttcaattcagtttccattggcggttttttaagtttctattaacaaattatcagaactttgagaattaccttgcttgggattgtctgggcttggagatcagtcttcccgtcaaagaagtagacctcaagttctctcccatcaaacattctgccgttgaatttctgagaatttcatatttaaaggacataaaatccacaaaccgaaatgaaaacctcagcgtctgaagagttcttaaactttatgcaaacaatcccttggggatggcgaggaatgggagtgaccttttccacttcaacgtatttcttgatttcctaggaaaggttataataacttaacctacagaaagaatctcctccttaagttcctcataaaacaagtctccagtctcgtatttctggaaattttctaaaattatgaaagttaccattgcgtcttccatggagaacatgggctttgaaattacgatacgcctgccggttccatcatccaatgtgtcagaccagccttgaagtctgaataaataaaattaaaagaaaccaggtacctcctttcttcatatttagcagcaaggtacttcttccttagctcagatttaattgatggtggaatgggcttagcttgagttggtttaggttcaaatttagcctgggaatacatttttaattaagtatttttacctgttccacatgaataacacagttgtctctaaagtgatagttgtccaggtatctaattgcaaggtcaattgactccttgttgacaaaagtaacggttccatcagactttagttccccgttctcgtcagtgtatagtttaattttagggagggctgaaactataataattttgaaacaaacttgtatgtgggtcaattttgatgatcccagcctttttaaaaacctctgcaacctcagagagagttgtgtccttgggtagtccggatacatagacagtgtgacttttctaaggaaaatttccaataaataagtgttaccagtgatcctgcgatttcgcctgagtccatcctctgtttcttcctcttaagatatagttttttcttctccctcttgcgcttcttggcctcgtcttcctcggtcaatacagctccttctagagagttatcttcatcgtgttcttcgaaattttctttatgttcggactctaagttggtttatttaaaaaaactaaacctattaagaattccttaagttcactgcaggatgaaataggttcccatgacttcataccttcacaccacacgttggtacacccatcaataaaggctctgtttaatagtatatataattaataataatatttatacgattttaaaagtgattttagagactcagtgtcgcaaggtccgcggatatcgttttcgccagcatggacgtaccactaagaaattattttatagatcaaataattaccttagcagtgtttggagcacttgaattatcatctgtttttgatgtatcagtcatgttagaagttcaaactctacgacgaccgaggcgtttctgtttaggtttaggttttgaggctaaaaatttatttttagaaaatttggaataatacgtgtaattttaagtggaaggtattcagcagatgataaatcctttgaaacggaccagtttaaaaacaaggcgttaaattggtttattaatctggaactggattctgggtcaactctaaatttacaacactaaataaaaacattatttgaaaataaaagaaacctgtttattatcagtaactttcaatgttatttttccttttccctttatatatttaaaaacgtatttagtctaaagaaacatcagagttaataaagtcaacacaccttcaatggtgttctaaagtaaagaagtcttgcttcgtgaaggaattcattccaattatcgaaataagtcatttgtataatgtgtagaatgaaaaatcgattcagtaaatgaaaatgagattgaatacatagagttaaaggaagatcgtcacgaaattaaaaatatgtaattatttaaatttatcaaatatatcaaaaatgagaatatataaattaatattttaaattattatacttcatgtacaatacgggtggggatttaaaatgtgatttttagttgaaaaataattttttatttatatataaattgattatatttaatccgatgatttaatactttatttgtatatgatcataagataatttacactatgccggactggttaatatcatctcctacaaagctggattctatttatccacctatgcaatgctttctttgtggagagtttgtttcggcaccaacatcctcaaggatgtgctctacttgcctcactaaatccgtagatttgagtgaaaacgtatccactcactgtactatacttcaatgcgtaacatgtacaaaattttatcacgatagatggtaatttttatttaaaatagttaaataactaaaacctttttgattgattttaattttgccttttatcttaggttaagctgtgaattagaaagtaaagagttattatcagtttgccttaaaaagattaagggcatcgatttgatgaaaatagtagatgcaagcttcaaatggactgaaccgcatagtaaaaaactgaaaattaacgttacagttcaaaaggaagttgaaaacaattgcgtagttgagcaatccctttcaatcgattttacaatagtctcaacccaatgcgctagctgcaaacaactatacactcctcatacctggaaagccctggtccagataaggcaaaaaactaaggataagaaacacatactgctactagagcagattatcctgaagcataacgcacacgaggtaactcattaaactaatcatcaatgtttagaatgttttaaatatattatcaagaaggaacgggtttgacctccatttctcatcaagaaatgatgcgcaaaaatttgcagattttgtatcagataaaattgtttcacagattaaaaatagcaagaaactagtaactcaagatgtcaataacaataaatacaactataaatatacattgcacgtctcactcgtgccaatctgcacagatgaccttgtgtttctatcacctaaggtctcctcaatctatggcggaatatcgccatttctcctcgtcgtaaacttgacctcaacaatttcactcatggacccattcacactgagaagactggaagtctcaagtgataaatactggaaacacccgtttgtgtcatgtaagaactgaaatatttatttgtttttagtgttcaacaagtttaacctgtgcgaattcattgtactgaatattgaaaaggactacaccaggaaatcaaaaaaccaacaatacgaacttgtcgatgttgagatcatgccctcaaattcatctaaaattatatacaccaagtctcatctaggcaaaatactgacagtcggaggaacatacttgggttacgatattaagagaataaacatgaatgggttatcagaacaggaaaccaacatcagtaatcgcattccattcgatgtaattctcgtaagaaaggcaaagaaatattcttctaagcacaattgggtccttaagagaatgttccgggtatttcattttcaatttaacaattttttagaagaaaaataatcagaaagataaggataacgatacggaagacgatattgacgaagatgaacttttggactttaaggaagaaattgtaaatagaaaagagttccaaaaggatattgatttctatcgcaacccaaggtgtgttaaactaaattcatgtgttttagagcgcaacctcgcaaggaatttgatattacaccctcctcagatatgtcagatgagttcgcaatgaacaatttatcagttcaactgaaagatctctcaattcatgatgatgaatacttttaaaatttttaaatattaaccacactcttaattgttgtggattattcatttaatttgattaatatattatttaaatttaatattaaatttgtattatatttttaataaaatgattaacagtgattcaaaattgagcgaagaatctcatgaaaatgagactagtgagaatgtagtagaggaggtcgttgacaaggacccttataaactaaaaaatgccgattatttgaaaccttccagtaaatataaatataaacaaaagattctggtctttggaaacaaaagcatatcgcaactgggaagaaacctactgagggacttaaaatcactccttcctcatcataaacctgaggttcgttttatttaatttcatattttatagtctaaatgggatagtaaagctggatataaggagataaatgaattatgtgacctgaacaagtaaacattgcactattcatgtattaaatttagttgcactggagctttgtacctggaatccagaaaaaatgagatgattctgtggatggcaaagacgcctaacggtccaactctgaaatcaagagttacaaacagtaagttataagaatataatctaattaaacattagtccacacacttaaggattctaagtttactggaaactgtttggcaaggtcaagacctttgttaacatttgacaagtcatttagtgatgaaccttaccttaaattggtccaaaagttaatttctcagatatttggtacgcctaaccaacatcccaagagcatgccattccacgaccactgtttatcatttttttatcttgataacagaatacacttgagacactatcaaataacacctaagaatgagttttccgtaaattctcccgataatcaactactggttgagataggtatgtgtaacactctaacacatccattcaggccctcagtttgttctagaaccgattttgattctagacggaagcttttctggcattaccctttggcgtaactccaaatatatatctccattaatggtaatttatcagttagtcaacaccattataggtaaagaggtatgaacgtgatatgaagttgaagaagaggaggatttctaacaaaaagaaggtaattctaactataatatcattttttaggaggatgatatagatttgccagaagatgaattatcaatatctaatgtgttttccaaccctgatcaggagtaacctacaacatgacttaatatatacaattttgtaaatatagttcaaatttacagtttattttattttattaatttttattaaattttgttaaaattttgtatattattcaattaaaaattattcaaatggagtttaatttcagtttattttaagtctgtttgatttcttaataaatttccaaatatccttccattttctactaaatggcgcatactactaaggagaacagagatatttattataggaaggcgaaagaagaagggtttagagcaagaagcgcctataaacttttacagattttcgagtcattccatatcttatatccaacacttgatgaagaatcagctttatcaattcttttaaactcctcttgttcatattgtgaaaatacaataaataaaagtggtaaaaatgataaaagtgaagagatttctagcaatttaaacacagaacacactctacttaatggttattccaactgtagagattcggatggagactcagattcagactcttatgactactcagacattggtttagtagattacgtaaatattaaacgaaactgcctcggattagggagaattaaaaacgttgttgacctctgttcagcacctggaagttggtcacaactacttagtaaaatggtccaccaggaccaccgaactcttaaaaacgcttgcaggaaacttcaaaatgaacgagaagtgtgtaaaaaccttgttgagtacgtaaatattaaaccagtgattgtagccatagatattcaacaaatggcaccgatagatggagtccattttttaaagggtgacataactgaccctgaaatactacagcaggttctgcaacttttcattgaaaacgtatctagaaacataaatgaagcttacgggggagaatgtaatgaaaaactcggaagaagtgcacagcttataacctgtgatggagctcctgatattagtggactccatgaaacagactcctttctacagtcttacctgataaaatcagctctttcagtttgtttttcacttctggatcctgatggttgtttcatctgtaagactttcttcagctcagaaaacactccgattttcactcaggtatcctcttttttcgactactgtacaatattcaagcctagtgcttcacgctcttcaagttttgaacatttcatagttgctgtgggttacaaacctgttggccatattatgaaaacgcctaaatcacatggaatttacaatgaaaaagaaagtgaaaatgaaattgactctgagcttaaagagattattaaagttgcagggaagatcatatcctgggactaggagttctgtctgcttttatcatcgggtgacccatctattgatgaagtcgcatagaatctccgagaatgactgcaagcttaactcgttactattcatctcgttaacttttagtgtaacctttacttgcccttccttaataatcacttcaatgtaatatattgctctaaattatttattagtttgtgtattttcatacccttgttcgtctttagtatacatgtacattgtactagcgccaccatcttcacttgaagcctaagaattttagtgaagattttagttaccaatgtcacgatgttgagtttcaagaataacccttcaaattcctctaaatttaaatcatttgggtaggactccatttcagtggagtatgaatgttcggattccagccacgccttttgaaactcctcctccaacattgtttcaggaaccacaaggttaaaatacttaacttcattctcaagctcctcaaacagtaatgtttcattattcgtggcctctggaggctgttcaactctttcatattggttacctagctcctgtgctcctggagaatagttctcaaccacttttctcaggccgtcctctctgaaaatatcagttttgacatccttatgctcaaatgggaagaatattggattgttcgacttgtaaaaatccaggcagttactaaggacgtaaactgtgttaaaatgttccctccactctggatcaggcataaagtagtagtcctgggcctaataaaccataattaatgcgtacaaaccagtaagaaatccttatcgtactcaagtcgatcattattgtcctcaaacaaaatcttctcagcttcctaaacatttttatgtgctatccaaaatacctcaactcctgtaaaaagcaagttgtagtaaaagttccccgacattgacaggttatagtcacttgattccagaacctaaacaccattaacattcaatcaatcatacgctttcgaaaagtcttgacagtgcactatgcatttccgccggtctctttagaaacacctttactgaagctggcagtagttccaacctaaattatcattttcaatttagagcctacgtcatgagttcagtgcgatcagggtcatcaatgtaatcctcgagtgtataaggcgtgtggtccagatcatacccataatctcctatatagcatttcatatatgtatgttttttaatcggttttgacgctatgatttattctaaaatacccaaaattgctatgtggtgtgacttagcctcagggtaagttatgtattcggagggctccttgacaatttctaaaagctcgggttctctttctgggtacaccgagaaaagagtccttataacatgaagaacagaggagtttaagtgagggaggttgaacttgtaaacgtcagaaatctacagacaatcgttaaacaatatttaattaaattgatttattcttgaaataccttttctattaaacatgagagttggttgggtatcttaagtgctataattcctaaagctgttattgatttatttgcgatataatggttcatgtcataaacatattcttttaattcttggatgatgttaacacagttttcctatatgaattaatatccttttattcctactaacctcagtacaaattgatacaaggatgttcagtttcaaggccttaatgtagggtggatcatcatattgacagtaaaaagactcgtaatgttcaacaaatggtatattgtagtttgaatcacagttttcttcagtgaagtctgggttttcaagcaacaactgagtaactaaaggaatttatgggtgtgaggcttaccgtttactatcagggacagaatatttgccaggagaacgtatgaaatttcacttctggtgcgattgatcaaggatagaaatgggtcctgtaagcgtttaacaacttccaattgaagaaataaatcatttcttgtccacattaagaaacactttgcggttgccagaaacatggctgatgagctgtgcttgagtttgtcatccagaaggttcataaggtcgaacatttcatccttggttgatggtgtatatgtccagagaagctccaaaacataacattgctcccattcattcatatttttaaggctaaaaattaagtgatttatgtatgttataccagtttgttaagtatattacagagggtgttgtaaggggtatcttcttatcatattcagcaatttctgatacagcacacattgcgtcaatcataacatgtacgtttttggaccttagtgctgtttttaaatcctgtaataaatcacatgtgctctttgaatcctttccgtatgtactacaatttgacttgaaaatccttatcgatcctattatcgctgtcctttttacagagtctgatgggtcaaacatcttctttaaaacagacatggttgcgtattcatttgacaaatttgttccaaatgaggataaattcctcaaagcaagtgatcttattacagggtcaggactatccacgtcctttagtagtgtatttatggctaaaaccgccaaatctggattatccatactataatttgataaatatagataaatcatcttcttttgaactgggtcatcagtttgcgataccattactacatctgtgtatagtgaagataggtcaattccaagtgtcatacaacctattagcttcttgagtacatttcttcttttttgtgtattttgaactttgaaatggtcaacatttggttctatgatttgtgaaacgattttttcagttgttgatggagattttgaatccaacaacatcctcctcaaaaggagccttagttctccgacctctccctaaataataaataatttccccaaaattttacctttttatgatttgaaaaataggtagttttgctcctagggaaaggaggcaacttatctaggccaggaaataccatggatgttgtattaacactaaatgagtaacaaaagagtgttaagaatcggaggtgtaagtcataattaatttatttaagaacttaaaatacataaatatataatacatggaaaaagtcatctttaattagtatatataatgttttcaatcaactataatgttgtgcaaagaaacaaagaaaaacatatttatgtaaaatattttaaaattttataacaatgtctgtatttactagaagatttggacatatatatagaactttattgctggatggaagcccggcaaataggacagcaaaatggactttaggtaatttttgatttatcataattaatttacagctctacttatcactggagtttggatatataaaagcgagaaaaagaatcccaaacaacgtggtatttttttcagggataagaaagcagtgcccttttatcaatatgaagtcgatgaatggaattctaaatttaaaggagataatatttgacaatttttaatcaatagatgtaaatttaacgttaaaatagtgtaaaagtttggattcctcaatttttaatggaatattgtatattaattctctatatgttttgttattggtaattaaacaaacccgtttgatttatataaaggtataaaagtcgtcacaacgtcgggttcacttgtgttttcatcctttttctcccagcaaaaaaataatttgtgatctctcccaccacctgtgccactcgatattgagttgtcatcaggtatatactctccattccatagtttggcctttactatgaatgaatttccggtaaattcagcctcattatctatttttacactaatttcaatctcctccgggtcaatattggtaggtatacaaaattttaacaggtttataagtctatttgccaagataatgttattcaaattaatggtaatcatattttctccactaataaatctggacatattctctaactctcgtgtatgctctagaggattaatacttttattaacaatcagttcagcaatttcatcattaataaaattttgaaacactttgcattctgtggcgtattcagtcttatattcgtgctcttcgtactcagttaacgatttattatcacggacctttgagttaaaaatttcatcttgtgtgtaatttgtgaatcctataaacccaaaccaattatctaaacaattattttcaatccaagcctcaatctcatcacattcttgaactctttggtctgacacttggataatatcgtctagcagttttaagtcaatttcacatgttatcttggcactgtaaacctcttttattatattattcattaaatcgactatttttatctcagaagtatcggagttgtttgatgaatcattcaaaaatctaagaatgatttttagatcattagtagtaaaatcatatttcttgctccatccaaagggaacatacaattgcctcagaatgataattgagtgtgttaccacacactttagtaaaacaaatttggaaaccgtcaaatccaaactatttgtaagcatcttgaataaatgtgttatcaatggcttcaattcagttagttcgcatgttattttatggcacgataataacatattctttgacaactccacattcatatcacatgttaagaatattttactactcttatatttattcaagaaatcagtttcaattttgttaatccaagtcttggataagtgtatgtttttcaaaattacataatttcccatatttaaagagttcaccatagagtttattactttggtcatttcagaaagtgaacctactgcatacacacccaaactcttggattttttatttgatatagattttgatatataaacagcgtcctcaaatccatcagttaacaatattatagtactataataatccagtattgtatcattatattcttctgattttagataagtagttatcaaacattgtggagaattgggaaggttattggtggaatcaattagttccttcaaatcattatcatagttagataaaattcttagcattttcattccccaaagtaatttgtcggcttgtaaaatacctccagatatccaattatatgttagtacaataatatcagtaatatgagtgtcacttgtgtacaatactttagtaaagtaaaacagagcattgtaatcaaaaagatataacctgtttaactgtcctaactcttctatttctttataaatataataaagtagttcaattagtggttgtttggagtcaatggccttttcgtatatttcatgtgatttcttcaggtcatccagtgacgagtctaatttttcatttatcatcttatactcatctataaattttacaaaatttgggtcaaaaacatccgtatctattaatttatctaacaatctagcttcattgttgttcatctttgcgttgatctcatcaatatttttactactattaatatacaaagagtatacttcaggttctaatacatcaattattctgtttttaacatattcaacaaagcactcactattcaacttcatattcaaaactatagacctgttatatattgactcaactatgcatttatcagcggatttgttcattttaaaataatcgtttgttgaaatgatgtacatggtaaaaccagtctccgaatctaccttctctttaaactcctttaatatttttagttttatatttacatcacaacagtggatatccttaaccaataaattcccagacaagctctttactgagtataacacgttcataaacttatcatcacaacatgatgcttgtgtatatggttcttctattaatggtgtatattcagactcatgagagtctagtataacaaagtgcctcaatcttttgtatctttcaattatatgtttttcaatgttaaaaatagttttaacattgaaagaatagttttcatcccgtttcttcaaaatctctgtacatttttgtataaatatgtttctggtactataatctaatgaggtatacatgggcataagggcctccattatagaattagataaaaggtacttattatcattttcaatctctgaaacccttttattccatctgaaaagttcattggttaaatcatcaaccacttttttggataaaatcaatttattttcaattatttcaatttcactttggattgtactagactcttgtatattcttaagataatctgactgattctgttcaatttccttttgtgattcagatattaacaagttttgttctgccaagatattctcatttcttgtatattcttcttctatttcattaatatcattctttaatggtatcacttgtttgtatatatcataacatattaatattgaattagcccattttgccaatggacctgcagctcttgatgctttaactatcctatttacatcccactcgtgtatttctaatctctctttcagcatattatatgtattttcttgcatcttttcaatatcatatagaattatttttgtgataaaatctggacttttcaaaagctttttggcatcgtcccactgtatttttctaccatttttcaatatcatagaaactgtttcgattgtgtacttgactataaatggagggctattcatgcttttaagctcttccaaggacctcttatttatattttctacctcttgctttgcccttttaatcattgggtcaacgttctctatttgactcttgatcatttcttttttagtatccaaaatcgattttctctccttcaaactacttgccaattccattgcagctttcctcttttcttcacactctttctgtttaatttccaacacttttattttattttcagaatcagaattcattttatcaagtttggaccttgtttgatttagtgatgattccattttatcaacgttttttttgaatactttgattttatctattcctctacttaggtgctttagtaatctactgttggtttcatatgaaatttcataccattgttttgtcattttaagtatgaatgtaaagtttataaatccatctccaacatattctttacatacattgtatatatctggaattaactcatttgcaccctctatcataccatgtgacatttcaatatattcttcatatgatatacatggtatgttatatttaataagtctatttataagtgaggtttctatgttatttcctgttatgataaatcttatattatcatttattttcattttcaactcatcaataaaatcatcgtaaggtatggatattgaatttttatcataaaaatccctaatctgtttatcatatagtaccactgaatactctttgaaaatcatgttcttaactatgaaatataccttcaaatccactacaaggtcaaagctaatgaatattgtatatattttatcctgtattccacatgctaagattgttgaaacaatatcttcttttgatttgttatgtgcttctataaactcaaaccccaaatttttagtcgcaattcttgataaaaatgatttacctgatacacttcgtccagaaatatacaaaaacgattcattatacattaatgtaaagtagataaagttgtatgtatcttcaactgatctgcaatttataacattgttgtttttaagttcacaatctatgtcaatttcagagatacttcttacttgttctataagttctggtgagttgtcattaaatctactttgcaaatgctttaggattagccagcctccgtatttccttgttaataatgacttaatgattgttaagtcatgataactcatatcttttccacatttattatttataaatgttctaagttgagaaaattcatcaaattcaatattactctctttaaacacaatctcttttaacattgacaaaagtctacacttcttctcactttcatgtgtatgcaagaatacaaaaactatcccatctaagtgaactttaacccattctacctcttcagtgcaatacctgtaaaagaacttgtaaatgatcatttgcctaaatatcgaacatagtgaactccattgacttgtatcatttaaaatctcaatttccttaactaatattattgtcctttttaatttatctcccataaaatttttctggacattctcacccattactgaatacaaataattaattatatcgctagaacctaatccttttgataaatatatcgttttaatgatatattgttctggaattttcttaaacaatgatgctaaaccgcatgaatcattacattgtatcatgaatgattcggattcactaataagtgaatctaattgaatatcactagccattaacgtatatccatttattttcttataaaaatacacaattgtacttctcgatatggtggcgggggttatatcttttaatgagtcagtttcaagaaatattctcacattatcccgaagagttattctatctccgttagataatgtcagtattctattatcatctaacagactattcaaattttcaacccactcttgtttcaaatcaccgtcaaatactatatacatatccttactagtattcgattttaatattttgggaatcaaaccctcaacccaatcatctccaactacataaccataaagttcggaagtatctaaggagttgggatcaaaccgtacaacttcaacccctttagtatacttgatagattcaataaatttattaaatgctaatgattttcctgaacccgattcaccaaataatatcactaaacttgatatctttgacatttgatatatttcaaatgatttatttaaaatattatcatcaatatttaatcttttcaacaatgcaacgaactctagttcatcatcagaatactttaacgcagtattgttttttataaagtgtttggatagctcaatttcgtcatctgtcaatcttggtaataacagcctgtttaatgattgaagaaatatatcgtattcattaacccacttgattgatgttgttatcaaattttttataatattaaacaaactcttgacaaatctaagcccaaaatcaaacttgactgaggtgaatactaaaccaagtgagtccaagataaagataattctatctgaaagttttgatgaagatttaaatctaaaaatcatcaaatttattgttaatattgaatgcaaatcaattttttccatgaaaaactgctgacaaatgtttaagcagtttggtggtagttcattccttcctgaatatccagggttcatagtaataaaaattgcattgttatcattaacttttatatttctatccaataatattacgtttttgcttgataatttttcagttattgatgataacacacactcgcttagtctattaaactcatcaaatataccccaaaatcccagttgatacaggccagataaaattttctccatgtcctcaacttcatacaactcacttaaattgaaaaccatcacgtttgaacctgctatgtatgataacgatttaatcgtctcagtctttccactacctgctgggccttgagcactaggtaataaattacaacttaggctcaatgatgctatcgagtaaaagtgctcagtaacgtcagtggttatcattttttgacaattaaacagataattgaaactatagttatattctttatacatgatttttagagtaacaacatcgttatagtggtaatatctcacacattttaaccagcacagttttgattcatttatctgggtctccccagttttggtaacttggtagtttaatagaagaaacaattgataatactttaaattatcaaacaaatcggttgtatttgaaactatgaaatttatcattttagatagaaaatttgatatttcttttgatgatttaaacgattcaaccgagtccgtccagcatatggacagtgccaaagttaatatttgtatgggatattttgcagtccactttgagaaaaatgcatcatcaaaattaaaaccagaatagtacggttttaactcatcaaatcctacagcaaataaattttttatggtggattttagtaatgaatccaagtcattaataaatttaatattatctccagcacaataatcaatgttgttatcaaaagtaacaatttctccttgtgtggactgtattcctgagacaacattctcattatttataacttttgaaatgcctggaaatatctttgacaaaaacaaatctatattagcacctccaaccaactcaatcaaatcagcatcgttaataaagtaaagcctagggcatttatacctgatatcatttaagcgcttctttgttattttctctatatcatcaaccctcttaatcatagattgaaagagtactatgtggctcccttcaatatctctgaatttgtttattctggataagttgttaatatcgtccctcaatgaacagataacactatcatgttctctgaaatccatgaatttgcatgaaactatattaagtaattttaggaatttatcactaaacttgttaaaattatcaacaaaatccctcgctttttcaatataactaatccataaatcacagtcattttgaaccttataatcgcattttgatgattttgtcactaataactttgtaatgttatcatcaatatacttctttatgtaatcaatattaccaatagtacaaatattagtctggtcaaacacaataacaatatgtttatattcaattgtaatgtcataccaatcttgttttaactttgtgaaatatgacctgattttgtagttattcttttcaaactctaaaaacccctgaagttccaccctttttaggttatacattcttaacaagtaagacatatttagttgattaaagtccggttccttaccaattatatttagaaatttatcagataattctgaactttcctgtataaaatacatatattctttatatatatattcgataaagttaatgtcatcctctatgtttttatcatacacctcaattttcacatctcttatagaagatatttcagcaagtatcgtgtcgcttgaagtaaaaatatgattttttaacaacttataatatctattaagatgagttatgtatggtacatatttctcactatggtcatattttggactcgggtccagaagttcttcagagcagctaaattccaagccttgaaaattcaattttgggcttgttagtagttcgtttaaattatttttggttgttcttaatattgattttgatgatattgtgtttaaaaagtccacaatgtgtaccaagttctatagtgtatattatacatagtatgaacgtaccataatcctctctcgtataaccatatctttgtaattaatattactatactgaaatggtatgaaaaacctttcataataatgatcatcaatatcatgcagaattttatcgtattcatctgttatttgatctacatacacatcgacattaaatacaatcatgttcttggtctccgatccgcccaacgcgttaattgcttcaataactggaaatgcatcaaataagttcagaccatccaaataatcgtttatacactttaaaaagtcatttttatagttatcaactctatattttgtttcgaatattacatcatctagtttcagtatattttctataccttcatttatgttactgtatcccggtatcacactttcaacaaacaaaccatatgattttgatacactagactttatttgatttaattccgtaattatttttggcgagttattaaaatttgaatcatcatccaaatatccagataactctgagattacagcactcatatcagcgtttagagctacaaacttgtgattaattttacaaacagattgtaaaatatctttatacaaatccaatattattatcatattattattgcttaagcttaaaacttgattatttttttcaaaatattttaccaagttaattgttttattctttaactcatacacaattctgaacgcctttattaacatcttctgggtttcctccatttgtgtatgatttaactcaattgatattattctactaactgagtttattgcgttcaaaactaatgagtttaacaacaacaataatctatcacttttcatataccttgaatttttatactttctcaaagtgttaaatatcttctcagttagcagagagaaatttgataatttgtcacatttaacaagctcatcaactttcaattctgacataaatgagttaatttccttaacttcatcagcaattttagatacaaactctttagattccgaaaatgagtatatattttctgcagagattccattatattctaacaatagcaaagcattaaaaaaattaggggattccattttcgcttttaattcatttatttcaacttgataattgttccaaaagtcaatttcttctgacaactcaatactattggagcagatttcatggacatatccatatatattattcaccagtccagtatttaaacgttgcatcttggatgtattcaatgtaaggagtgaattactcatcacacttctatgtgaactattcgtagtatcagaagatgtttcactggtatccgatgacgtatcagtagtatccgatgaactagatgtggtttcagaggaaccagaagtggtgtttgaagattcagaaatatattctgaactatcagtactagtatcctggtcatcttcagaaaactttgacaagtatttttttattgtttgaaatatctcagtcgaccactccctaacatttgactttatatcttctaatacgaattcatcctttatatcaatctcataaacatttaaagttttagtatctgggtcaatgtaaagaattagtgatttacacaagggaaaatttggcctacctgtacataaatcatcatctgaactatcatctgaactctcatctaaacacaatacttgtcttaaattttgacataaatgtttaattttattatttccaacatcatttacattaccagccagtgagttagaagtgcaaacaagcgtcagtaaaccttttaagtacccacaaactgttaaatttaatgggaattcattagtagaaactaccggcaataatatgaaagtatttgtgtcctcaccactactaaccaacttataaaaagcaataaaattgtttaaatctgtatcaccttcaaacgcaccgtgtgaaacgaaaactctatttgaaaactcatgagcattttcactatccaaatcatctttaaagccgataattaaagggatttcaggattattttgatcaataaagttcgataaagtatcaaaataacagttattaagaatatctataacactagcgtcagagacattaaaatataaatcacaaatgcaagaaatgaagctgagggagtcaggaatcccggtaaaaaccttggaggataagtttacattagcaatcccaggtggaatcataataatttaaataatcatgttaatacaatgataaattaacatataaattaccaaaggctaggaataagtggaagaagaacattgagtctggaataaataaatgtatctagttaaaatctaattaaaataataaaaataaaggataatttcaggtttattcctttttaattttataatgtgaaaatgtgttagtggaaagaaatgtaaaagaaaaaggaaaatcaattaataaatctcataaaaatttatgaatagattcacaatcaataaaataaatgtaaatgtatgattaggagaacgtgtaatcataaaattaacttagcaccatacgtataatatcgaacgtctcattatattaaatgattgttacaaatttctaccagtaatgatcattttatattctttctaagatgttatttttaacataatatataacttatgttaaattctatttatggagaactgtgttatcaaaaattctaagaggccgtaccattcgacaatgggacccttactcgaggattttaacacgctcactaaaaggcgtaaaaaattgtttgataatataaatacccaaattgatactttaataaaacttttacaggtttgcccttacttttaatttattttcttaggataccgatgacaaactcaattctacccacctgaatcatctaaataataatttaaatggattaaatcatcagtatgataatttaaatggcaaaaccaacggcattaatgggtttaatcacactaatgaaacccataatactggtggacttgattctgaagcccataaccataatcacgtaaatgaatacaccaatgccaatgaacacaatggtgttaatggttttaatgaaaataaggaagttgttttaaccgatcgttcaagtggaactgatgacgaaaccatcagtttaactgaaaggtcagacacaaaaactgaacattccacttgcgaaaatattaatgagccaaatttgtcaagtaaatatgaaccctcaaatcctaaaatttccacaaaatatgactcgagtgacacaggaaatgaaacctcgtccacagattttaataatgagccatcgctgtgcgaatgtaataggcaattgataagggatttggcatcaacagttaagtcttatgacttatacaggaggataaccaggtcattgaaggagtttaatgttcagtttaatgacatgggccgctcactactgggaccccgctcaaccgattgtcatgagttattttcaccggtcaagttagatgaaagactcgtatgcagaatgataggtatgcacctcttacactatggacttttcgacgtctacgaacagctcaagattgaatctgagcgcctttggggctctgaccatattggaacaattggaagcgtaatggtaacagcgtacagaactctgcacgacctcctagataagataaggagtggagatattgacccagtacttgaatggactaaacttcaatacgacagttccaacctgcacattcaacgttttaacgaaattatgattaatttatacaaaatacgctttttaagcttcctgtacaattttaagcctaaactaaatggatctaaagaacaaaatagcactaatcggaaccatgatagtgatataattcagcaggttaaggacagcggaataacttcactgtggaagatccacaatgacgagatagggaagttggtgacccagctgatactgggtgagaataagcccactgagtctgagtttgaggaacttaagaataagacagtgaagatgttcacgaagttgttttgtgaatcaggaatcttgatcaagaagccactcaactacgataagaggccattactctcacagcttgtcgaagaccaatttattgtaaccactgaagctaaagttgaggaattgccagtggaagagtcacccaaacttgacgattccatgaatataactgataatacccgcacattattcggatacagaacaattcataaagaacagtctaccaaaagctacaggcccaagtacaattcatggcttttgacccttagttcagaagttcaaacaacaccgacaaaaccagtacccgaagtgtacaaaacacccttgaggaaggactggcttaatttatcagagaaacccaggcagaaacagcccagaatggcatacagatatttgaactcgaagtcactagaatttggacgcagactaaactttataaggaataaactctgcaacaattctcctcgcgacgagtccctttcattatccaaatcagttctcataacgacactatgtgacccagaaacgttttgcaggtgagtatacttattaaatatctatgcagtgttgttaaactacaataatagaacttaactatatatacatatgtaatgtgttgctgtaggcaaaacctgatcatatcagaacatatgctgaacaatataccttattatgttgaaaatcaattgaccgaagatgagtcaatttcgtttggagcgtttactgatacggaagactggtcctcatcgagggctgataggaccacgacggtgcttatagcaactggctcggaagaatctgaggagggaattttaggtctatcaaacatgggaagactaattgataactattcgacgtctgtatcttcagaggagtcgtcacagaggaccacgccaacattttcactgaccgtgtttgcaggcccctcgatattcagggactctagactctcttctcagcttatggaggctgacataatctctcagagacttcttaacgtgtcaccaggatcaaggattaggattagggtccccacactgactgaagaggaaattagaagtaccccgagacgcgaaagcttagttagcccctatgatccaccagttactgaaccagctgtggtagctgaagaggaagaacaaactaccactactactaccactactactacaactaccaccattgaacgttcaagtattaccctgcgggtactgatatacatagttttacataatagttgttctgtttccgaaccctcaatcccattactaatatattttttaggatatattgagaatgatcatgagaggattgagagtagaaactcagtcaacagtggttcgattcagaggttcaagaccacaacaaaatctcgaaggtattttttcactagttttctatttcttagtttttgctagatcagttgtctagtgtttaattatataaattactgaaacatttttttagattcaagaacatcttcaactgagtcagaatcaccaaaggacaaagcatcatcacacaagagactaataagaccaaaatcatcaaataaatcggaatctcaagtcgattctgattacattaaagtacatttaccatatgaaaggtttctattacgcataattttacaccattaagtagttaagtactgaactccataaatatgattaactaatggttttagtccactgtcggttgttacgtgtgctgggcacgtgacatttccgtatttgttggatgtgttgaaagtactgtttaaggagcactgtgaagtgtcatcaaaggtgggaatgtggctgaagtcaaatcagcaactaccagtagagtcagacctcggaccagcattccacttccacagctatttaacctgcgcagtctcaaaggaccaaacaagcaatgaaaacctaccgataatgctctcgtgtggccacgtcatctgcaaaatatgccacgatcgactgagcgggaagaggaggaagaggctgttcaagtgtccaatgtgtccgacgatggtggagccgaatcaggtaaatttcagaaaaaataatttattctcagacaatggagctgtatctggactggaactgcaatcataaccagtgtgtatactaaactctatctttcgattcaaattgcactataacatttttcaagattttaatttttatacatttttcattcgcaaaatgtatagtatatatttatataatttaaatgaattttaatggataagaatcggagatttgacgcgcagaaatcaaaccgaggtaggaatggcaggcccagccaggctcatccgagagaaaaggggaagaatgaagtaaaatataaaaacaaaatcctgtcgagagaattgaaggaaataacactagatgttttcttcaattctagactctcgcaggacctgaacctgtcaaggcagcaagttgaccaactcttagattttaaaccatcgcatcacttcaactcgtacctcaactgctgcatatgctacgaaaacacactcatctgcgcagtaggaaagtgtgatcacatcacctgcctcctctgctcactgaaactctcattcttctataacacctcaagtaacaatacagacaatgacacaaacggtggccgaaatactacaaacagtagtagaaacacaacaaataatggtagaagtgccgtaaatacaggcagaaatagcctaaacagtactgtgaggggaacctatgaatgcccgtactgcaaacagcagaacgactacatatatttctgcgttaatccgttctacgtccatttagcaaagaataataagttttactcaagtaatgagacgccagccctgacaaaggctgagttaacagagtttatatacattttaacaaggtcacggcgtttgccagatgactgttcaaactcgtccacaataaatataatgcagttgtacaaaatatttttaaacacaataaagaatacagttgacatgttgtcgtttaacggactgtcaaaatgcttgagcggtttgggggtttcaggctcgaagcctgatttgactgatcttatcaataaaattactgataactttactttccacgacgatttcgtcatagtatctgaccagaggatgttttttgagtctgcagggatttattatttatataaggtaattctttcacctttgtgctggttcccagagtgtaaggaccagtggtatctggacgctgttttcaagagtaacctggtggaggctttaaagaccctttcaagtcataaatacccatcttacaaggttttaaacaaacacataaaggcatcacatacaatggtgttctgtgacatttgcctatcatatttcaccaacaagaagtttgtctgcgagtttacactgtataatacatctagaattagtgaccatgtaaagtacggagatgttaaatcctacccgccaattaacccacacatatgttgtccagcttgtaaaacttatcactgggatatgactgcctttaaacagcacgcaaaggatgaacactttatctgtgaactttgtgactcctacgatgattcttactgcgtattctcagactataactcactttttaaccattttaagacctaccactatccatgtgaagaggaggagtgcatgttcatagtcttctcagatgatatacagctacagttacactatttatacaagcacccaggggttgcaagatcaacaaagggtaacaaaaagccgatacatataaataacagagttaacacagttaccagcaccacttcatcatgtgcatattactccttggatgataatttgacgtatgacacctgggacggctcaattaatattttttcagaccaaaaaaatgatgatttatttgaaaatgccgaaacaattaggctacccgaggttaaatctgacccgctacaggaagttgaagacactaagttatacacttacttatcaccattggatggagatgttgatttaaaagaggatagaaagaggttagatatgtttttaaaagggttaaaaggtagcaggcacctaccagtgagttcagagtacataaataattttgatgtaacgaagtcatttcatgtttttaatgatctggaaaccgttttaacacattttagaaggttagatataaaactttttgatataacaagttatttgtcagagttgctgtcaaattgttacatttcaataataaatgctttcacaaaacactataacaacatagttaatacctgtgacttatctgacgggacggtgcttttcaaccttgttaaaagctatttacttaagtttgtcctcttcttttacactatacatatcaacaggccaaggtcagattctgataaattggcaataaagatcgatgttctgaagttgagggagcacaaccctgatataaagctgggcgccaatggcatactgttcctaattgccgccctgaatttctcaaacatatcaaaccgcatcatcgtaaaagcctctttatcctcaattattgacgatatgaaggcaatgtataaagagtctccctccccaatgtcactttctgaagcttttaacctcaacaattctctaaacagctcacatggtgctggtaatatttcctcaaatgctctgaaccccaacgccgacataaatgagttcatttcaaagaagcctaggagtaataacatagtgaaaatccccagaaaggaatacattgtgaccttgaagggtaagaagatgaagaataaaccccaggtcattcaccaagaagagcctgttgataccaccacctcaatagaggaaccaattgtggttgaacctgacaaccctactccaataaacatctctgacggattaatacacctggaggctttagaagctgataacgagactctattcatgaaccatgtgggatctgggaacttttacggcctgatgtgcgacatgatcggaagcctgctaatttcaaacatgaagaggtacaaggccaaaacatttgattattccctgcgtgagactacaaaactgaagattttagccatcgcactgtctcaaaagaggtcgctcaccaacttgggtgagtttataagcatgaagaagctggagtctctccagtccctcgagcctgagttccatcgccttgtgaaagagtgcaaaaagagcgatctccccacaatcgctaaggtttggaacaaaaagtgtacaaacattctcaagaacactcaggttgagcatttagagatcctgcacttttacctcaaaggcaattccgacacctgcatgccactatgtaacgacactgagttccccagtctcacaaagaacaagaattctcctgagttcactggcaccaggaactacgccagtgccgccggagttgtcaataagcccaagttcatgaacgacctcgagtttccaactctaaagcaaaccgctaatctacacaagaaaagcacacgtaaatagcactcaatgtaccataaactaaaattttacacactatataaactacataatatatgttgtgtatatataatttgtatgatacatgtttgtatactgtatatccttgaacactagtgttaatacaatctagtacattgtatatagtatattaagcgagattattatattacccccaagagtcaatgataattttattttgcttaatgctatcgtcaatgaatctcttagcagcttcagttccgaaccctgcctccttctccaaaacaagctgaagagactcaattacctgagacggcattggatgagacttccctccaatcaccaccaacccatctctcaacaccgggtaaacctaaacaaacattaaatgttaaattttgtaaaattaataactaaattgagtaattcatactgttgctgaatttagtataattgaatgttggacgtagaacttggttttcgaggctctagagtacacgaagatgaacctgcaccagctcctgtacatgtgataatcagtgtacaagtgatcctggttcggcctcctaaatccaataaacgccaaatccttcacattgggtatatatccataattcttccagatttccttcactaatccattattaactatttgggtatgataggtatgtgggataactatatgggagtataactataaagttagaaagaagttgcaaaatacatttaaatgctctaaattgtatgaatggcttaataacagtgattccagtgcccgttgcgataaataatacagggacctcaacattagaaattagttgtgaaaacgagggcttatatattaaaaaatcaacctcatcaccaatagtcaggcttgaaaagtaagctgaatttaagccctcaacacgtcttttataaggtgttacatactttactgatcccacacacaactctatcctgttactgagactgtacttatggtctaaaaactgtttgaatatggtgaaatccagagaacttggatacctaggaagtgtgtaaaggaacttgttgacaaagccaacctcactggatgcaatagaataaagccttgagtagtatggattacaaatgttaatcactacttgtaggggtaatttaacacttgggaagtcatacagaacgtcataaaaagaccttttttcgagccaacagtacctgtagtactctaaacagccctgtattgtatcgcctaccatctcttgcagtttatccttgtgaaggttattattagcgtacattgacataatgtgcatttggaaaggagtgcaaatattccttagacacagatacttggaaaatagctcttccagtgtcatgaactcgtcaaattccatcttcctagacgatattgatactctttcaacatcgtgacccttagacactgtcttaattggatttttaaagtacttgttaaccacactcagctggggctcattgtggactgataaaactgtttgaattgtgaaattggaggaattaaagtctgggttacaacctatcttaacaatcatattggggtctaggttcatgtttttaagcatacttgcgacagtgttatcggttggaagacagcaaaacacatcacctgtcctgtacgctggggattcggtctctatcaccagagttcttacattggagaaatgggattcactcgtgataatcttattacaaactactctaccagttttatactctgacttatctttcttcaacacaatcttaggcttttcaggtaaggtatctgcactattatgacccttgggtgtggcattagttgaagagtcagatccagaattggtatgcgataaaggggtaggctgtgaaccaaattccgaaaaagtaatagtgaagggcaaagtatacttgtctgaacaactattggtaacagtgttattagtaaagtagtttagaagatcatttctccatggtatgagttcgccggaatatcccagaggatgttgttcgtctccaaacgccaatggaaagaactcattagcaccaagtgatttcaacaaagattgaagtctcctagccgcaaaattatacaaagggtatctactatccccaaggccgaatattgtatatttcaatttctccaagtaacttttactttccttaaccctacccttagaactatcaagttccgtttcgatattgattagagagttaataaaagactcgaagttatgtgggaattcaccgaatgcacaggttggaacaaagaaaataacatgttcaaatgatgatagggatttgagggtgacaaagtcagctaggtgaatctcaacaggaagtccattccttcggaaatataaataagtacaaaaggaggccacttcagtatttcctgtttccgatccatatactatacaacagctattcattttattatcacaatattttacaaggaatttatttttatttaaatttttacttttattgaagtcataaaaacttttaaaaaattattcaaaaaatgtgttgtaaaacttttttgcgcagtgtgtttcacatttcagctcagaattgcgaacagtttctctcagcgttttatccaacttttgtttaacgaagaactctggatttggccttggtggctcgaacaagttctggtcaatcacttgacctgccagctcctttaatgatttttctgcagggttatcttgaactgtcaaaagatctttagatgtgcctgatttaacttcgtctggcagcaaagaatccagggaggcgtttttgagtgttgttcttagtgcgtttgaggcacactggtcgtagcactcagcatacgactctgagaactcaaaagcctttaaagccgatttatttaacgactgtcttatgtttcctgaaaaaattaaatttaaaaaacttaaaattagttaccttctagtgcttgtttttccgaatctaggattttctcgtattttgtgagatttttgagttcattttcaggattctcactccttttaaagaaagaccagaatttcccctgaaataaatccgagttgaacacagacatttatcatatatttacaaaaatatatattaaatttggtcccatggggtttagagttctctaaaccttgtttaactcctgaaataaatgactccacttcctatatggatatgaagggttattcttattctccttatcatacagtattttatgacagttcctatataaaaatgtgtattgcccaatcatataatgtgtaatttgcaatgtgtaaaagttactttgaaagcagttccagtgtttgttccgtagatttatcctttccatatttctaaaaattcattaaatcacaataaattaccttataatagtacagaagtatgaatgaagtgcaaatactatagtttgaaacattctctgcaaacttaaaaaccaagtctttgggctaaattccatcataaaattagtaaaaatcacctttactgtatctgagaacattattgtggccagtaactttaagtataagtaatccgttggtgttttaaagttaaccacagcatccctaaaccccaattttacacacctacctaccttctaaaccgatctgacgatataaatctcattaacccttctgaattctggttcaatccatcaacgttcttcaaactcgtctttatcaactcaattgaaacctatattaattttaactattgtagaaatgattaacttaatactacattaattataactcaataataaaatacacttaatattaccattttgaaaagtaattttgtaatatttgatgtagacgagagtgtattaaatgttgtatacggcaaagttgataacttctctaagaatatgtgcagaagtgctaggttaatttgtcctattgttgtttgtgaggacttgttcacacttgaatagtgcctgtttgttagtgatagcaggttcccaatgtgagtgtacgaatcaaacttctgatgatcaaacggctctagtattctgagtattatattcttattctcttcataattgaatcttacagatgtagaactaggcgtttccttagaattattatctgctgaatcatttctaaacaggttcagaaagcttctagaagagcctttaaactcatttacacttttagagtccagcttcggcaggtataaaatcaacaagctgtggaaaaaagtgtcaggatcatcctcaacaatcttatacgctgaaccgccttctttgtcatttgattcaattctaaattcacccaatcttctaaacgggtttttatcacctgaatcatcagaaattgagttatcacagttattagcgttgtccgacgagctttgtgtagtcaaatttgttgttaaaaagttagagaaaaacggcgggaccttgagttcaaataacttactatccttctctatgggatatatatactttaggagctttttaagtgaaaccggtttacagacatttgtatacggtttcagatatgatacaattttcttcaaatccaagtcatcatcatttattttcatcacatctattaacaaaagataacagggtttttatattttaaataattatttaggtgtttatatctaaataactgaaatttactgtttaattgcgattctagtatgaactttacaattccgatataagtacacgaaagtcctaaaaactaatatcccttaaattaatacctagtgagattaatgcagtccaatatccaatttccaccttagaagtcagcagcatcatgtccatgttgaacaaatagtatacaaagtatgatacaactttattgtacagtattggattacacaggataaatgatatattaaacaattccatatcatcctaaattattaatacaaaattaaggaaaataaatatatacaattttatctatgtaaaatccactattaaaatacctttactgtaatattgtatgtgttgtttttattaatcattgatataagttcatctgttggaagattattatccactgagttgtgtactttattaatcagttgtaataagttgaaattaggttcaataagcttcattccagagtttgtgattttgtacatctcctggcatttcattgccaatgaatatcttattaggctaaaatagtgttctcctcgtcctgggtacaacaaatcattatcaatatccaagtttatcacgttctccaatatattctcaattttcacagaatctgttgtatcattcatttgctttgatctataatcagatttaactgtgtacgttgagtgaaaagtatcattcaatgatctgtttccatcatcaatcgtttctggctcataatttatcgtgttatcagttgtatgcgtaatgtatgagtaagacagtccaatagttttatttgcataagttgtatataagttacacaaatcctctggtagtacttttgtgtaatgaagttccaaatttttgtttttcatttcagaaaacctttcagttcgaaaacttaaactacattctgcagtcttactcaccttcaccattctctcctctgaattcttattcactcctgatttacctttaccagtatttgtattaacagcatttgtatgtttagttgtgttagttttatattgtagggaacttttaatgaataaaagttttagtattgtaacagtttggcagtaaacaattctgctacactctgcctgagggtctccaatcaactgcaacatttgcgaaatcaacatgttatactcactaacaaattattttaaattttaaaacatactttagattttcatttgtggacaaattacccatttggtcatcaaatatctgaaaataattataattaattagataaaatactcctagtcttaaaaggaaaagcgccttaaaaatcaatggtgttattgtctcatttaacttttccggtgatgccgcccatattttacgctttatattcaatgtgctgatctacaattattaataaattgaacaattaagtaaatatttaattatactttgtaaaaatggtgcgatgagtatctatcctctagtatttttgacattgctgattgtgggatttccactaacaagtcgagcacatccacaatcagaggctggatttgagtaacttggaacatagaaatcattttctcggccagcatagacagtctaaacatgattttatcatatttacatacttttcttgagaatctgaatgtcttttcatcagtgatgagagttgctttgacaggtaattttcgaacaataccttataggtaatgttcgtgggtattccttgtaacttcaataatcccacaatagcctttgaaacctaaacatcatgtagcaaactcacataaaaatctactataactatttatattgatgaatctgtaaattttatacttcatcgggcaatccttgtgactcctgccaaagtcgacatgccataactcctggattggcattattaatgcctctgctgagcttatagttgtctaaaacacattaatttagtcaaatattgttcttaccttcaagccatttaatcagtgttcttcttccggcgggaccgcagtgaagtcctgaggggaccttaagaagtgagagttccgacctttcacttcgaatttgttcttcagaaaaatacgattctcccttttcagactggtttgaaaatcttatattccatccggtcaaattcttgtaatccattggaataaaactacgttacacagtttttaataaattcataattcaagatcaattatttataaatatttgtatacacttaaaagttatttatacaggaaattattattaaaattttcaaatataagggggtgtgtgattccatggcgaccaatgccaaattaggatcatttaagcttataacgttccaaataagcatattttatagtctgtttcgaacaatcgatgaatgctataatcgtctacaccaatttatataataattcaaattacctttttatttgcaaatgtggagattctattccacctaactatcgaactaatcttaagttcctcatcagaatgcttaatgaacactaagccatgtccgtggaagtgttcagggtcctctaaacaagtcttatgtacatattacttaccttcgtatatactgaatgttgctccataattcattccatccttcacgattagtcctttttttaccaagtcattgtataacaagctattatcttggcacataatattattattttaatttcctacgcaaccttccacgttgtcactacaatttttaaacaggctttagaataacttaaattagttaatttgaatgtaaatttttgaaaaaattaattttttttattattatcattccttctatggtacacattaacacatcctggtttattcctaaagataataaacacctaatccgttacttgtataagttattatatttaagctcgtcgttcacgcttcgtgcaacttcacagagatgtttggtatctaggaacggcaatttgactacgtgttcccactcgttatccttcccatcttcgcaaatttcaaaatcttctggaaaatattgacataaactaccttcaggaccactcagactcctgtagaacccagttaacaccattacactagttattaatggtatatactatcatataattattgtgttttatacctatatattggtggtaggagttgtgaattatttgggggtgtgattgctagtaagtgttccagtggcgttattggttcccctttatagaacttaattgtagttcctgaaacctttgccaagtctgataccaacggcgcgtagtggtatttataacacctatactcattattctatcctaaaaagtaccaattccaacttgggcaccccaagtgatagtacgataacgtccaaaataacccctaaaacacataaatttgtaagactttacttcgatgtattgttcacacattttcctaatcgcctttttattattgaaatcaatgtcgcacttattttcataatagtatttcgcgtatttcttagggtcactgtaatcacttatcttctcagacatcgctttcatcttaaaatactcaaattcgtttttacacagttcctaaataaaatattaaccatagacagtctctatatatctaatatccctaaacaacaatactttcattagtaattgtaatcttgacgtattaattttgtatgtttgtgtcaaaaagcctcttaacttgggcaacattttatagtacatatttataaggtcgttaaagctactgttacacagctccacagttggtaaatgtggtaaaaagtcatttcctaaagattatttaacaataaaagaagatgttaatacccgccatgaatgagagtaaagagaaatcgtctgacagtctatttttcgagttggggtgaaacaaaaagcggttcaaatcattctttacagttccagaaactctcatacaccttgaatacatggtctaaaacagtttattcacttttaactaaacccttcttagcacattcattgacaacacttcataattattagtttttaggtctatgtagtccttcccatgtatatgcaacagccctacacattattatagaattaagccaaatattaccaatgaacactatctaaaactataagatacctgtttctttggaaaagtaggggtttggtttctcttttgataaaatgtgcggtgtaaaattatgttcttctcttagaatatacatttttggcaattttgtaatcagcgacaacattactaaatcagcgtctaatccatataccaaatgtgtcgactttttcacattgtcatccaactccaccatctactcatttttaatatacaatcaatataaatggtatatatgtgtgaaaaactaactttacgaatagtatcataaattttatgttcaccttcaccgggcacatctgtaccgctataaactatatagcagtcattccaggtcccttcataattttgaagcgctatccagttcctacaatacaacgatatgtagtgtataatatgatgtagggaaatgcgatgcatacgtgattacctaatttccgaatccatcattgacatgaactgtgtcccaggtgatatgtaacttgggttaaatgtaacattatcgtatgctccaacttttaatttattaactttatatttcatttctccattctctcctttgtagtattcgttatcctacattcattatattatacaggaactattagatacggaagagctggatttgtagagccgaaatcttcttgtgcgctgctgatttatttttgccgaaggacaaacgccatcaacaccgatgtacatcatcttcttgggattcacaagcttaaaagtattcaacattgcagtcactatccttctcattctttgctatacaatacgtcagtactatatttaattaatgtgtatagatacctgatcttccatcattagaactgggaaaagattcccgtgagttgcagaatgtatcacagcattcatatcgacgtaaaagtagtcaactcctctgcctgaaaattaatataaattggtatatacggtggcatattatggaatatagagtaataaagtactaatttcagagtcttctaagggtgttctaacccttgagaagttctccatcatccatccatataatcttggaactccttccaactaaaatactgacattactttgataacttactttaaacttatcaaccgtacacccagtttcctttccctcatatccgctaatcaattaattaatgttatatatttgtaagcgaaggattagtaacataccggttatttatgggattatatgatataggaggatgtttatacggtataataggtaggttaatgaaattatgtgaaaattttttattggcaaaattgacacataagattccatccgggaataaagaaatatgaaaagtgctaataattaacaaaaacgaaaaagcattcagaaaatgctccatctaataatccttcacatttcatcttcataattataaacaattaagaatcaactcgtctgtataaaaataaattattagtttaattaacattattatctacaaattaatatcttttgtttgaaaattaaaacattaaatacactaatattgtttaacaaaacaatatatttaacaaaaatatataattgaagaacttataagattccaacatcaaatattatgaaaataaataacgtcttgttaaatagttttaatgaagaaatagaattatttttattgtaagtaaataaaatttttagaaattttaaataaaaatttcttgaattcgtatatttcttccatccaaaccgttctagtggatatttttcaaatgtgtattataatcattatacaataataatttttaaattaaaatacaataataaatttgattatttaatgttttaatagttattttataatattgatgtggtgacatttattcactatataattcttctttacgttctgttgttatttttattttttatatataaaaatgggtttcgaccattttatttaatttatttttaatttattcacctgaaattttaatcattttattcaaatttttgtttagttttataatataatgctagaacaactaaacaattcattaactccaaaccttcatggtaatttattattatcccaaaattacttttattaatatcatcttaggcgagataactcttgataaggttgctcatgtgaaggacgagaccgttaggtttctggagaagcgcagttttgatttagtgtcttttacatactcttatgagccagaaagagcaccagaaataaacaaaatgcttgaagatgatttggataatttgttactgaactctcacagacagctggcctatcaccggctttacggtgataataagtctaacgtcgcgctgtataactcgaacttaaggcgattggagatattagccagagaagttgaagcgtgttatgaccgatttcaaactgttaaaaataataacccagatccaacaaagtattttttaacccacaatattcgtctcataatcctaataattgttcagagttgcaattatacacatatttggagttgatgacttagagaagagggtatataactaaataataccaagtttttaacatttcgttaggtacaacaatcgttgaaccagttagaaatattaaagaaaacattcgataacttgcaagaaaattgtaaaactttacttgagaattcattacacctaagaagaatggtatgattagattatttttcatgtttattagttgttgaatttacgtaaccaggggcaagttattttttacaagcaagttcaagtcgcctctcttattgatggtaattttattactataatcttatctcactagttatctccacctaataaatataatagagttcgcaatgtataaaggagtttatttgaaggaccatgtggctgataaggcacacaaggcctgtttatcgcagacagcctcagagttatccgtagactcttgggcattacgtattaaatactgtaaagatacgcttgaaaatattaaagcggaagctcaaaaatcatacaataatgttaataatggcagaagtggtagattattgagtgaagaacaggagaagaactttcatgatgcaatttcgacgaatagtaaacttatccaccaacttacaagaggtgctacataccttttgacacaactgagtaatccgaatggacaattatagcgttaaatcaccagctatgctaagggttcaaaaaggtactaccccaatagatttaccaatttgtatagagttatcagagttgacaatgtacgaaggtgttgagataagattccctgatattaacgatgtaatgcacttggagatattgatcactccaacggaaggtatttacaaggatatcaaaatcactttctcatgtcatatccccaaccaatatccacacaatagacctaaaatatactgcaaatccaaagtaacacaattacatagttatattatttctgataactttctattcaacgaatttaatttcaataatcaattcaaacataatttaataattgagcagataatacatccaaatatattgggaacaaatgctgagaaatgccaaggagcagtttgtttaaacatcttgagggaggactggcgacctgtttacacaattaacacagccattgttggactcgttaacctcttaattgaaccacagtctgaaaacccactggataagtttgctgccaatttgttaaagcatgacccaatgcatctgagatcaattaatctatcactaacttacaatacaccttatttaaaattatttactatcctaatggtatggagtgaaggggatgagtggattctgtaaaatttaataaaaatacaaaagtaataaaaatactttcagaaataaaaaatttataatatttgtaaattagtaacctattttagtaaatatgtgtaattatgtgtaaaataataagggttaaagtatgtagaaggcagcgtgggggagcaagctattaaaataaacaattttaaatatttaaaaatgggaaacactcaaggaaccaataattcgcaaggtacgacatttatttaattatttaaattagtttcatcctattttgtggtgtatattaagtttgtagatgataaaaaggataagaatgatagtaaacaaacccgttctgaccaaccggttacctttggtaaacgtaaaaggaaaatgttaagacaattagctccagtaagaataccaacaggtgcataattactctttattattcaattaactattttcgtaataattacattattttactatgaacataataatccctttagtgacaccaaattcaaaatgccgattgagattattaaaacttgaaagaattaaagattatttattactagaagaggaggtattttcggttattttctataaatataacttcacacccttagttacacaattttacttaaaaccaactatttcatagtatataacgaataaatcgttacataaacccctgaaaacaaagaatcaagatgacttgataaagcttgatgacattagaggatctccaatgagcgttggaacgttggaggagatcatagacgagaatcacgctatcgtaacctcatcaattggccctgaatattatgtaaatatactctcgtttgtggataaggagcttctggagccaggctgttcagttcttttgcataacaaaactaatagtatagttggaatacttttggacgatgtcgacccgctggtgtctgtaatgaaggtggaaaaggcaccccttgaatcttatgacgatattggaggccttgaggaacaaattcaggaaattaaagaggctgttgagttacccttaacaaggcctgagttatatgacgatatcggtattaaacctcccaaaggcgtaattctatacggaccaccaggtaccataaatataattaggttacactatcatattcgcaatatctttttatttaaatacttcatcacattatatgtatacctttaatgtatggttcagggactggcaagaccttgttggctaaggcggtggcgaatgagacttcagctacttttcttcgtgtagttggttctgagcttatccagaagtatttgggagaagggcctaaacttgtaagggagatgttcaaagttgctgaagataacgcgccatcaattatttttattgatgaaattgatgctataggaactaaaaggtagagtatacacatttctacacacaacccaattcattatcttcacgcttattatatatgtggtaataaaattggtataggtatgatgcgacaagtggaggagagaaggaaatacagcgtacaatgttggagttgttaaaccaattggacggatttgactctcaatctgatgttaaggttattatggccacaaataaaatcgaatcacttgacccagctcttatcaggccaggtagaattgatcggaagatccaacttccgaacccagacagcaagactaagcggaagatattcgagatccatacttcaaagatgaccatgagcaaggatgtggatctggacgagtttgtggtcaacaaggacgacctaagtggagcagatatcaaagcaatgtgcactgaagcaggtttactggctctcagggaacgtagaatgcaaattacacaagctgatttaatgaaagcgaaggaaaaggttttataccagaaaaagggcaatgtacccgatgttctctactgctagcatttcttcagaaataattttttaaattgtatttttatttgttttattaaaatatttttaaaattaaacaaacatagtaaaatgtgtatagaatttccttaattttaccagaataatattagtaatatagtgatgattgaaggattagataaggatccgtatgatgaagctgaaaagtaaattcttacactatattttaataaatcttaattattacttaataaattttacagtaaagtaaggaagagtataaggaaggcgattttattgcaaagtcaactttatgatagttctgggtatccaaatctaatagtatatatgtataattatgtattagggcattgaaaaatgataataatgaagctctaaggggtggtgatgaattggcgtccgtttgtaactcgatcgagaatgatattggcgagttacaaaaggtaattctggcaattcagcagaatccaaacaagtataaaatctcccaaaccctcatcgactctcgacaacaaactattaatgaatttaaatccaaattaaatggaatagttcaacaaacaaatgtaacatttgactatattaattatttttaggaaaagaaatatgtccaaacaaactacgcctcagattattctaatgtacaattacaacaccaacaagtactttaaaaatcctttaatattcttaggatgtgttaaatcagcaaaattaccacttaaatgagttacatggttccgctcaaacactccacactcaggcaatacaatttaatcaagaagttaaatcacaaaatatgtatgaaaatattctcctagtagttatttactagattaaaattttataatttggtatgatttataataaattattattaattagtattaaaattattttgtttagattgctgagagatgttgagcagcagatgaccgagtctcaattgcacatagataccctaacgagaaaattatcgctatttttagacactgataatccttcaattatcagactcatacttacgctatcagttatagcaacaattctagttgttgtgctgatagtcttttaacactttaatcatgttttaatattaagtatagtatagtaatagggtgaattatataaaaatattataaagttgatatattccataaatcacctataattataacgaatagatagaaacataatcacactatatgatattcaacatttaaatcatttaactttaaaatccttgtcgaagacaaagttgctccgttttagatgtggaaagttctgtggagtcttccttcgctcgttattcaactcgtttgcacccatcagctccagacatctgatccttagtgtagcattcccttcgggacatgagagaccctgacacttgaaattagcgtcaccttcattattgcagtagaaacaacgcaacatctgtctgatgtgtttgggcacagagccccagtagttactcctgcgaccctgccagtcgttctgagataagtagtgttcaaggagttttccattggctttgcaggagtttcgactccatttgtgataaccaacacattttacacacttttggaactcacacatgttcttactggatgcacttctggcacatctggtaaaaccacagtaataacatatactgcgctgtcttcggtacaaatgggctagaaaaagactgtgacacggcttagcgctgtcaatattataatcggaactttgggaatcagatgagatgtagtaacgtttacccattgcgtaaacgtctgctccaacgtttcctgtggcgattttaaacgattttgggtatgaagaaaagaacctcctcatctggacatgggccatttcagtaactgttctattaagcttagttggtgacaactccagtaaaatacaatccatgttagtacttggcgatatctcatctatatcatcaagattctcatttttaagtgatgagagtgatgaggatgatgagattgactgaactgagtttgaaggtgagaatgacttcctcatttctattgacataacttcgtttagtccatcaattgacattgctgttttcagctctgaactaagtggttctggtgtgatatcacccatattttctactagattaccgttatctgagttaactctgctctttccatcaacttctactttatcagatgattctccacgggatatagagaagttaacgcagaaatcctcgctgataattgaattataaataaacttccttatatccattgtaattttgcgatatttttcataaagttccgggcaactagactgattaacggatgataaatcccttatatgggttgccaaatctatccgaatagtcttggtttcctcatctaggacgtttaatttggagtctgaaaactcctttacgttaattgagggttcatcctcctgaggttcggaatccacttccaaaggctctgagaacgtctctccagtcacatccaacgagtatattaaatccatcccaaatttaagaaaaccattaacttacaaaaaattaaaatacaacaaaaattttttataaaaatgatatattgtgatttatattaatatagtgtaaattattagcaaaaaataaaattttataaaaaaatttaaaaattaaactaggactccaattgtaatgtgaaattattctcttgttctttgaatgtgtatttgttacttgtaactttatttaagtaatcaatcaacagcttaatcaccttttcttctcctcttattctcatcacctaaattatctattaagttatgataacatactcttttctcaatctcttctaatagttctttatatcttaaatgtaatgagtttgctatgaacgattccagcaacaatatcaggtctgtaggatcaacatcagtggcgttcttcattttatcaaacaaaagaatgtaaaaaatatcattcggctgttcattgcttcttgaaatataatgtatgatgtggcaaatatcacttatatctgcctcaatcaactatacattaatgtgtaacttgtataattttggaaaaattaactttttttatatagtatgaaatttagtttcaacaattttaactactttcatataattaaaacgactagtactatgctaaatgaattaccatatgtgtgttattgttgattagtgttgaaacttcatttgagaggtcacttgaatataagcttgcccaatcaaacatatacagtacattactcagaatctttacactggtcaaataagagtcagtatacagttcactcctataaaaatgtttattctagtataacttagtgtagttacgttgttaaaaaggtgtgatcccctgtgttatacgtggatatatctgacagtatcctctgtaaatatgtttccagcagagtgatacagtctgggttcttattactgtaaacccaagttataaagtctaaaatgtgtgatattcccccgactgagactgaattcactctttccctacactccttcaacaacttcaacttcattcccgtatttatcttaactagtttatgtgataacacatgcaatatctgaaaatacagttatttatagcgctttcatacttgtataaattgatctgaatccgcagattgaatgaattccacgatcttatcaaagaggtataaaagctttgaacggtttgttggtaaataatcacccttttcgtttaaatacatcaaagcttcttcatacaaactctctaccattgcaccttttacaccatttgtcactttattatgctcaattttgacactactagcaactctctaaacaataattaggggtaaacaattccaatatataacttattattaattaccattaggataaataaaaagttggacagttgtttaacataattatcataattgttgattaattgttccagtatccactttccaacataatctctaaaaaacagtaaaaaagtatatatagtgttttgtgtgttataagtggactaatgaaatactgtgtaatcaggttggacagagtgattgggaaagtaacacgataaaagtcattcgaaaactgaaatgtaatatttctcttcaatataatttcaacctaacaattaacattgttaatcatccgcttaccaataaactcatcaaatgattatccaaatcatttgctatataaaaatagtgaaataatttaggtaaacattctacactcaattcttcatgatttttatacacttccattacaactgtatttattctctccagcacattctacaaataaagtacacgtgtgttaaatgaaaagtatatatagcatacctccataatgtgttgagctttataggtaacattagactgcaatagtgaataggtatgtattaatgtacacatttcattaaatgccatctaaaaagaataaaaatatcattttcataccttttcaacgtttaatttatagaaaatttgttctataacattttcatctaatttttcatggttatttaaaaaggtgagggtatttaaaaattgtaacaaaacaccattattaaaatttaaagggttaaaatttattaaatttatattatcaattaatttattttcaatgatttcattattacacttatttttaaatatcagaaatgatgataaaactaagaaatgatcgtacacatcattatcatctgatggaactgcattaaatttagatttctcaaggaataactccaaaagttttaatgttaaatcggagaacttctcattcgaatgtgttaatgagaaaattaatttagataattggttcgtgtttaacttgtcaaaaaggcttaaaattctataatttagaatcctcatcaatttgtttccaattttcttggtatcataattccgtttctccaatctatccaagttgtactctagtaatccatacgaactaacgtttgatttatttaaataacccgaaatagtatcaactagatcgtttaaattataatcaataggttttatgctttcatttgaagtagtttttgtgttattaattattaaagaatccaacttatcattattattaaggggtttgaagtatatattattgttatacctaaatttagttaatatatttggagtgattcttataaatggtggaatctccataaaattagataaataatgcgaattaatttaatttattgtgcggttatcgtatttacacattttatataagtatcttgtttttaaatttatcatcaaattttgaattttaattgatttgttaaatatgttggaacatgttaatatattataattctttattgtatatactaaccttccacattggctttatcaattcgattattcacactaaaaagcttctttacattaattctccgaatattttaaataattttagtgataatagatccggtgtgacgtgtaacatattttttggaaacccttctattactattgattctgacgaatacaatcatcaacatcatataaacgaatatttcaaaaaactcactaataaatcgggaaaacccagtgattcacaggaactaccggattcttcatctaaagaacagccggaacttggtgatgtaccaatagctaataatgtcctaactgatgtgttgcctctggctcctccctcagaggatgacccattggaggaaattgttgaagacaatgacttgtcaaaacccccatcaaacaaggacgactggagcttgaaacgtatagctcatggacgccgtttttggcataaattctttgccaagccgtcagaacaaacccttaaagcggtacggtggattaaatttgaacacgacaaaactaactgtaatcggattttggaaaggacatatactcaattacccaaggttatgcctcaaaagggacctgacgggaagtttttacccctatctaagaaagacaaaataaagaacaaacactcgttaaaggtgcaaaggaagataattgggtatgataatagtggcgaagttagcaatttattgatattaatgaactatccaactgagaggctggttcgcttggtggagaagctcagaatgcctggaatattagacctcaaaaactacgaactcttaagactattaaagcattcaatgttatatttagccaaaacaaataatttcattaatgttatccagtttttaataactttggggaaatttaaccccaacttaaagttaccagaagataaaatccctgaggatgttccacagtcggagcctataatattaccagatcatagtacagcatatataagtatgggtaaaggtaacatatacaaagggaaaatcccaagagtcttgatgagatataaaccgatggcatattcaatcattggaagattaaaaagtgacccatttaataagaagtttttattaccgagaaaacctaaggccaagccaattagagaggtgtttccagtctttaacccaaattcctcactaactaagttcttaactgagtcaatgggattagttagggagtatcaggaagtaccatacgatcatgataaaaccatggacagatcattttctgatatatttactgaaaatcaagtatatacaactaagaacagcgttaataaattcgatttcccaaccacaatcaattttaacaaacatctaaaagactatttaataaagggcgtcagtgaattgtcagcggctgatattaagcgtatattaaaacatgctccaaaattgggattaactgatacgtctactttaatataccgaattaagcaattacacactcatgttggactgacgtatgaagaaatacttagaatatgtaaacacaacattacgatactttcatttgggaattacaaacaaagatttttaaaaatttacgacattgatgaaagctttacttacgaatcagtaaaagaattaattctaaagcttccaaacctcttaacatataatattgatcgttgtataaagccgaaaatattatacctatttaggataatgggtaaatcagtctcagatttgctagaatatcctaaatatctcagtttctcactttatgatcgtataataccacgacatttaagcgtaatgaataaactttacaatggagagttcttaagcgtttatagattcttattccaaactggtttctaccattcatatggccaaccaattacacaccctaagataccaaaccctttaccggaaaatcacgagaaattcttgtcattttatatggaattgaatcgagatttgaatttaaaggagctgataagaaccagtgacgaggaattttgtaaaatatataatttaacgtataggaatcttgtagaaggcagagaattcgcgtttaaaattcccttaccagttaatgtacaataataccatatattatacactatgcgatagtttatgtgtgtgtataatatccaataatgtatgtgtatcacacggtttgttccattgtttgttgtagtgtattgtgtatcgtaatttattaaataaaatgttatttacaggaataaaaagaattttaaacttagatatatcaaaattttaccagttaaattattttacatatctaaagaatataaatcagtattccacgacaaagaaggtaaccgactatcttacacatttaaccattttatacataatttaacacgtttttttagtttttaaaggatgatgagatattggctgaaaaagtcagagttttgaaggataagaaatttatgggtgattactccatccatgaagccaagttacttgccaagaaatttaattcaaatttaattcttttcaagccaaattcagtcccaccaatttgtatcatacagaactattcagattttatccaatcactttcgaatcccacaacaccctctgttagtgctgagagtaaagtggaagaagataagggcgtttactcctttgacccatctttaaagagcaaaaccgttcaaatatctgaaaattgtgctattcctgacctgaacagaaaattatcttcaattcgtaagttcattacttctggtcacaaggttgatattatacttcaaactaccaataaaagtaagaaatttactggaaataaacaaaacaacaataaagttaatgatgcaataatagatgaaaaggattccaagttatataaggaggatgagggtacactaattcagaggatcgatcacatatattcaaggctaaatgacatagcgaagcctttcactgtaaaaaacaaacttaaccttaattctagacaaattattataaaattttaccctaaataataatttattaagttgtaatcagtgtaattttcttaaaaaattaatttaaattattcatgagttcttgtctgaattcaggattaaaaaatttgtttgtaaattctcctagttccattccatgctaagatattcattaattttagataagtatttttaaaaaaccttttggagaagttctgtagctttttttgttttgaaaagttgttggtataaactagattccagaaaattttcaaggcttttataccttttaattatattaaatgccctttcaggtcctaatacacagttgaaaactgttatctatttgaataaaaaaacctatctctggaattctgacatttgctttatagcctaatagaatacaaaaatcaataaactggtccctggtcatccctaaacacaataaaattggtaattaaataacctagagattttaacatttccgcatggtttattacattaggctccttagatcccaaataatctcttattacattcggagctctatacacacattattaagtggtaaagaatatataaatgggaatgcaagatacccataagctatggcattagtatcatcggataaaacatagtcctcattattattacaaaattcaacacatttctaaaataatttgtaataaagttgaaaatactttgcatatgtccattgatcttatctgaaccttggcaaaattgttcatcaacatatttgcgatatcattaatatccgtatgtgatggattcggataaaatgtataaattgtgctaccctttaaatactctcttatccgcctcagtaactccttatcctttacgtcaagtatattactgtacaaagggtccttaactttagaacttgtttcattgttctctagaggacctattacaaatgtcgactcaattccacccttaacatctaccgctttcaaggacttattgagtactactaatggatttactgaatatttcattatatcatctctcaacaactttaagttcacaaatggttcactactccctgtatacacacaatcttaatgtgtaatatgtaatatataactgtgcatataaaaaacatagaacgcgaagtaagaaacctgaatgactgaatttaagtcgttctagtacagttctgatagaagcatgtagagaacgccttagaatcatagaacagtcaataaaaactcttttgccacccaaagagtcgagagagcccagaggcttaatcacctcaggaactttcttaatcaaataagggatcaatccgtttattcccattaataaatactatgacatatttacaattcacatattataatgatttagcatggtttgatgctagtgtataagaatcaaagaggaaggttatatatataaaacgtaaaaagtcaaaaatcaataaatttaaaagaaaataatatacatttttgatgataagaaaaaataaaactaattcctgcttacacactataaagttaaaatgccgatttatgcacttaaaactgcttttaacacattcttttaaaatttatttaataaagattaattatattttatttaaatataagaaaaaatgggtaaaaaggtatttctgacctattttcaatcattttaaaaatgacattccaaataaaactttaatatttaataatttttaccaaatattctaaatattataataaaaatggtttttattataattagaactagttaagagtctatatttggactttttttgacaaaaatgtctcagatttgtcaaaatggctagttattcagctagccattcaatggaatcccgatttgattaatgagactcttgttaattaatcataattgtctggatttattcgtttatgtgatttttgtcagaatttcatacttaaagaattcgtacttatacttacttgaaaattcatacggccgttttctgatattcatttttacctcatttttagtccatcatactgttttatgccattatatactgtaaaaggtgtgtaaagtgtgtaaaaatagtattaataattataaaaagtgtgcgtagacttgagatgggcgtgccaataatgatctgcaattttgaagatattgacggcgacgactactcctggctcgataacgacgaggcaaagagctacttgcgcgagttatttaaccgtggcgatgatcaaaggactgactacaatgttttgtgcagctcaatcaacgacatttacctgtcaatcttacgaatccgtgaggagatgaccaactcatacaacgtcctcctaacgtgtgtcgacttacttaaaaagtacgttaacacgaactgcgccaatagcgaggacggaagcaccctggattcctccacttcaagtactttcaggggcaaccaactggacgacgtgtcggacggactcaatgactccctgggcgaagaccatcagtattcctttcctctggcctcctgtgtcaagtgttcctgccttattaagatcgttgtcaaccacgctgttgctgggctctacattggaaagaatggcgctcacctaaagcgccttcaaagcaagtaccaattcaagctcacgcagtctggcaggggagcaaagggcgactttactggcgtgggatatccttgtcataggactaacactacacttctcttccagggcaatctggtcgacattttgcacggcctcaggcccctttacaagattattcaaagcgatattttggccctcgacgacaagtctttggagttcctctccggccgcactgtcaaggtgaagttcgagttaaacctcgttgttcctgccgacaggaagcgcattttactccaggacactggccgcaggtgcatgcagctcagaaatgcttccggcgttgaaatcattgctggcaagcagaactttgaggttggcaacattaaggagagcattgttactctcttcggctttgaggagaacgtcgagagggccatggaatggttgggcatttttcttcaagaaagtcctgccatcacttctggcgattactactttatggactaccctaaatacaccactgccattccagaaactaaccgaacctaatatcatacaaattttctacataaattagtatcatatataaagaatattatcttttcatttgcttcatcaatgattgcaagtcgtcattttgcgagaattccttcatgagtttcatgatatttcctgctcctcccatctggttcaacaaccttgggtcaatcatggtctgcatcttattcaaaagctgattcgggttcctcattatgttctgcattgcattatccttattcaaacccatctttcccatgcttccaaccatcttctgtaatctgacaacatattaattgtttgagtaggtaggtgggacgatatgcaggtgtataatatatttaataaaaatacgttttatgttgatcaattagaaaactgatttcgtgtggagatgatcctgaacctttggcaatcctcattattctagaaccatttaacggtttctcacaatccaactctaatcatattttaagagctgttttattaaagtatagaataaacaagtcaatatagcataagctagatttaatcataccttcatctgtcattgaatccataatgatcatgaaccttttaatgcgatctacaccttcttgttcccttcctgcttgtagaagttcaggcggtattcctggcagcattgacattaccttcccaattggagccatttttaataaattctaaaaattgcattagttatattaaataaatattataaaatagtatgcgagtggtattgtgaaatcagtattttgatacttgaaactggtcgtacatatctcgaatggtaaacttagcagaggcaatcctgtccaagaggtcaggtttatcgtctaaatttatcacatccttcaatgtatttattaatccatttatatctccaaatcctaaaccattttataaacatatatgtttattagtatttacttaattctgtgtaaagtaagtgaaaatacctagaagacgtgaaatgaatgatttgggatcaaagggctcaaaatcatcaaaatgttcaccggttccgataaaaattataggcgaattagttgcagataccctaaaaacagattataataaaacattcaaatgtatatataactagtggtcacatacgctgaaagggctccacctcctttggcatgaccatccagctttgtaataataacagagccaacgtcaacggctttattaaaagctgcagcctggtcataacaggcctgtccgatgtgagagtccatgacgaatacaacttcgtctggttgtactgcgtcataaatgagcttcatctcatcaaagagagcgtcttcttgcttgtgtcgaccagaagtgtcgacgatgatcatgtcatacttctcctccttaaaacgtgcaacaccgtcagctgcaaccttggctgggttagcctcgctgtaactaccgtaaaaggaaatcttaaccttagcagcgttctgcttaagctggtcaaaggcaccagcacggaacgtatctgcacatatcaaagcagttctccagcctacaaattagtcagtctgttacataccaatgttaaattaactaaaaatacacacctttacgttgataatgatatgcaaatttagtgcaacttgttgttttccctgctccttgaagcccaacgaacatgattacgttacatctgccctttttcggctcgaacggtttcttctccgttgttaacatatttaccaactcgtcaaccacaatctatacacaaagttagagaatttgtacagattttaaaattaataataaatcataaataatctaaaatcgttaccttttgcaaataacgtcgtttatttgctccaatcatatctgcattgtttttattaagccgcttaacattttccttcagcttatgtaccaacttcacgttaacatctgccattaagagtgctcgtactatgtcgccaatcacctcctcaatgacctaaacatcaaaattaaaacaaaacacaattattttatccttatatgataaaataactgtgaaaaaagataaataattatgtaaaaagtgttacagcttctgaaataactgtcgttgagtggagtttgcgaaacgcctttgttatttgattacttaactcggccaaaaccattttaaaacgctatttaatccaatgtttagattattttacttcattataatgctgaaacagattccggtaacactataagttactactccattcttaaattagtttaaacacaatcatttacaaattaaacgttaaaatttctaaaattacagttttatatatttttgaaaattttactaataattctgtactcaaatcactcttaatagggggcttaaatataatatatattcaacaattatttatattattttataatatgtatgtgactgttataattaaattattcgtcagattcttcttcgtcttccacctcattagataagtttgggggtagcattgactcatctactcttcccattccctcatcttcctcttcttcatcctcatctccttcctcctcatctgtggtttcatggagctcaagaaggtcctccaggtgtttctcgtcatctccaattacaaccacttcgcacttctgcttaaagtcgcctccggcaaatgatttaatattcttttcaatcacttccaacgtctaaactcatttattcatgctcgtatacaacttatactacactgtttaactgtaattatatttaaatgtgtatattatattctgattaaacctgattcatgagtgccagaccagcttccttgtcgaaacaggatgttaaaatttcatattgtggaggagcaattaatcttattgaaatctacgaatttattacacactcatataaatgtgttgtgtgtattacctgtggatctaacagtttggcttttccaagtgacattttaactgcgttgataccttcaggcccgaaacaccatacatcaacactacatctaaaacaattgtaagattgttaacagttacatattataaaatgcttaataggggattggagtgtatgaaacaaccttactaaatagttaaaaaagcatttagttacacatagtttcatatttttattccgactcttggcgccgttaatattcattaacaggaatttgaagtcggactcttacattatactaacataataataactaaatgtgaatggttaatacttaagtttaagagcctgggggacaagtcttaattgtatgtcttgtaagagtgagtcgatgacttcttgtgatattgatatattcttaaatacattctctttattagaggcagcctcctataaaaaaattaattctacaaaccttagtaagtagtaggagtaactgataagtaataactaaaattagaattaccttaagcgcatcaagagcatgtggatatgctttatacagtggccaaatacattccctattcaactcctcaaccgatattccgtgcttctatacacaacattaatacgacaaatttgaacataattgagtatgaatacacagaagtatgtaacatacttgggcaatgtgtctgacagtttgatgtacttttttagattttgaaaacttttcttcacatttgataatgtcctcaggagtgactctacgcttggacaaatctatgtatccctttaagggatcaactctcagaaccaaaactacttcgtgtcttccaattttgaccaatttgtttatactacgatagcgccttttacttaattcattcagtaaaattaatcctaagaaattattataaaatttaaattgaataataaattgaatctaaaataccttcacgatcatcatattccagtaatgatacatacactccttgattttcaattcgattaactttgaccatgacgagatcctctggctcagggaatttttgttcgtaaaaacgacaatcgcccaaattaactttactaacgggaggcattttcaaaacccaattatataataatagtttaactgatttaaaaaaattaataatactccaattgtttaataaaacaaaaaatttattggttcagagaaaaataataattataaaaatgactcagtaacccaacagtatgaaataatacacattagtaaagtaaaaatacgatatttaaagattcctttaatttttattatatttaaccattctactctttattttgttttttactacccttttaattattgtaaaacacaatggtttattccattttattgaataaattcacaaataactgtatgatttttacattttgtgtaaactaattatgtatattattctttataacttgctcaataaagcttctatattgtgatgataaggaatatattttataatatttgttttaatagaaggtttgaactgaattcacttaaaaaatggaattctacaccaattttaagaaatttaaacaataaccaaagattaatcctttcaagatcattttcgacagcaaatacagaaaataacaccaaagatgaaaccattaccatatcctacggtcccaaagatactcttttaatcacagggtaactttaacactatttactaatttttcagcacttcacctagaaatactatttttagatataatataaaagaaaatgagttaaaagaccatattaaaatgttggaggaatcacttaaactcaagcttatgacattggacttttattctccagatatcgcaaattcatattcaggtatcatattcataatattatttacttctttacaatgttattgatgtaattacatgattattatttagataatgtaattagtgctgattttatgttagagttgggtatggtacagcatcaatcacttgaacatataaataaagccaaggagaattatataaaatcttatgaaatttggaagaaaattaaaggccataactcaagagaggttgctaacgtattatgtttactcggttagattctactttcaaagtgatttatttattttctctacacacaccattacgcacatctctatatacttataactatgtaatccaatgtaggcgttgtaatgcgtgatttgggagagattgaagcatcaaaatcaacattactggaatctctatcaattgagtaagaatgtttctttgcatatggctgtagtacgcatcttaatactccagagagtaacttatgttcagtatattcgttaaacaacctcgccaatatatcgcatttacaagagaattataatgaggtaataaatccgcaaacactaccagtttaggcctgcgaatattatgaagatgccataagaatattactcacagccacatctggtgatattaaccaccgcctcatatcactactatactataatctaggtattatagttattgttatttcttaactaccattaatatccacttgtttgtgtaatttagtttgattatctgtgttataggatgttcatactatagagtaccagatatgtacaatgcaatgatatcactcaatagggtaatgaaacaaatgaatgtatactttcaggcatctgaaatcataagtagaattggtgacccttgtaacatactgcataaaatcagcgatttgcgggaagaaattaatggaataatttccaatcaataacataccacgatatacaaactatttataagattgtatatgactaatgagtacatgatacgataaattattggagcagggataagtgttattcaacgcatctgtaggtgtaaagcctgtatctgaggaaacggccagtatcttcaaactcaagagagcagctttcgtttccgtcgcatttatccttggcttctccgtaaaaagattcaacaaaacccttattcgtcagctttggaccatagataaaggctgttacggtcttgatcttgcgatcctcaggacacactggctccaaaggaacacccctaaaaccaaccagagtcacttcctcaccctctttaacagcagaaccctcattctctatacggaatataaggaagaaattactaatattatatttatctgagttatttgggataactagtgtaggggatacggatgcagaaaagaacgccattgaagatggatttcccttgataagcacaagttagaccgtcttcagttttgaaacgatcttcgccttcttcaaccttgttaatagataaggagcactttttcttttcgttaaaaaaggtctcacaatatttgtagtaggcctttatcagagggttagcggataccttgttgttctcagcagtgtcctggccggctcttttatcagcaggtacgtggtcagcagggaaccagaccttagtatcgtcactaatgttattcacatcagccttacaaactccgtaggcctggaggtaatagaaacttgagttgtcaggacacttaacgaggtccaaaggattcctcccatcaaccaaaaaatctaaacagtcataaacaaatataagtagaaaaaacaacaaatatgtgtatataatgtaaaaatctgggagtattgtagatgtgtagagaaattactgtcaacacgaacgacccttttgacaactaaaacattattaaaccaagaaaatattatttaaacattgtaaatattaataaaataaaatgtgattgtggataaagttattagttgaaagatacctccgtcaacctgatgtgtaagtttaatgttgagaaaagtgatgacgtaaaaaagtaaaaacattggaatcttgcctattgttgccattttgttaaagttgttcttttacatatttggtcagacttaaataaaaattttccttaaagtcataactgtgagatgtaaaaatcgcttgtttaaattaatttgcacaaaaactataaaattataacaataaataaattaagaaatatttacgattaaaattttgagtcaaattatcactggaattctttatttataatactactgtgcttgcaccttgattccatactaggtttatgggctttttttagatctaaaccaaattaacggcttatatcatatacaatacccttaaaataatacataaagtataaaaatcgagtaaattaagttaaaattgagagtaaagtgctggagatagaaatagcactgacacactggattccatcaggaatttattattatattccaaaaataatctttttgactgttcttcggtctcatattcacacacaacaattgaggaatctggcttaaatttgccaactacttcactatatctttgatcttgcaacagcttattacacatttcctcatttaacaatttaatatcgataattgtaccaaattctgttaaaacctcctctaattcatccaactcaaccttcctattccctttaaataatattatacatattctactcaaatccttttcgtctatttttacctcatccttaaccttttccacggtagttggaacattagttacagtattattagatatattggcattaggtaaggtgattggaacaggtttgttaggagcattaataatgatggcgctgtttttacctatagatttagctactagaggcgttaccattccttgttcatttttacccaaaccttgtcctttccagcccattttctccatcattttcaatgcaacaggctgttcagtctttttaggctgtgtggtagctgttacactctgtgtcgtaggtttttctgtgtatacttctgattttttcatggcttctaatcttatctttaacatctcgtcgcctacaataagtatatagtggaataaagtaatacctgagagtggagcgtgacttggagtgttaggagtcagttgaataggctgaggagttttagtatgcgatttaattgaaagcagttttgtcaccttttcatattcattggggtatctcgggtcatattcatcattaaaattataatttacattatttcccaatctgtaaccaaccgtattggccttattaacagcattaggtgtattctgagaaggtttatggcgtttaactgtatttggtgggatataaagcctatgagttagccatgaagcggtacttctagaaacaccttcacttgtagaatctacatcaccagaatttgtcattaatcacactgttaaattattttaaaaatttaaaaaataaatttattataaaaaacgtaaataaaattaaaaataatatattaactgtagaaagtatacatggtgtcaaaaatgaactattgtgtaaaaaaatcaaattactaaataaacgttttacaaatctttataggattgctttaatttattaaaacacttttcttctaactgttcatcttccgattcatcactatacaggggtatacacatatctataacatacacagtatctgtatgtgaagtttgatcaccaataaatgtactatgtttcacgtcacagtataataattcatcctaaatcaataattaacagcctaattcagtgtaccggttgtattgatgatgatttgtttgtaagaatgaccatataatatgggtgatccgtaggtccaaaagtatcatttaccgtgcccaagattgttctatcatctttacatattattgaacccaaatctaacactccactaccctaaaaatatattttacaattgtattgatatgatagagtaaatattactggtgaagagtgtataatgagaatatcatcaaagaatgatttacaggttccaattctactaatcggcaattcttcagataccttttcgggcaaatcaacagtatcaattatctaaaacaataatataatgttatattatattattatatgtatatatttaatgttatatagtgatagaacccttagattatctagtggatccttaaaatcaggggttaattgtctgaaaaaataaaatcatagttttaaaaatacgctgtatgaatttgatttggggataaaacgtcctttagtgactcatattcaacatcggaatctgaaaaatcaatatcctcgttttcaagattgagttgcgatagatctaatcccagaggttttgacctaaaacagattattaagaacgctttcataatttttataaaaaatacgttaatgtatcaataaggtacgatttggggatattatttttaaaagtttttagttcatttattttagtatattcgttctgaaaattatttggtgtgtaaagtgaattactgtggcaaaatgagacacaaaggccagatcatctacttctgtttggccgtcaattaccaacgacttctcttttttcatgaatatatcaatattttacacatttcaagttattactgtacaattcttacaatataataaataacaaatcatataatacaattaattataattaaaataaaaaattatttaaaaatcatgaagataattttttaaaataaaagatcatatactacaaaattgccaattatagtgttacagtatcataattatttaactttttctgtactatattataattttatgtttgaggttaggaataaattttttaacatttattctaacccattttttatttctttaaaaaataatttattcaacccttttaataaagtatattttacacctaattttattatacctattgagaattcccctaatttattaaataataatagaatttacaatttcagaagacatagaggtggcaaagttaaacacaaacttcgtaacttagagaaaaagaagaaacgggaacaacttctcaacgatcaacttaactctgtaaacaataattaaaatttctacactctctaatatatttaaacgcagcaacaacattatatcatactgtaagtgtgtattaaaatctataactccatggagactatgttgagatgacaacacggtttttacacttgatacactcgtacatgattgacattccttcatcggcagacctggcttggaatgtggaatatagatgagtgtcgtgtccgcacttttcacagttgtacttgacagtttgtttccctgatttatttgccgttttggcctgaagtaacttgttactcgagtatgagccgtaaactgagtccttccaccattgcttctcattctcatcaaatatgtacgcactcctcatcccatataaatatactttatcatctccttctttgtctgaacatattatatatacaatcgtgatagtatagaattacctgtatccatcatattatagtaagagtctgactgatttttggtaaaaattggtgaaatgattgaatcacagttttcacactttaaaaacttatttggtttgtgtctgggttgatcttcagttgaatcatcaaagccgaagaacatatgggtgtttttaaaatctacaaacgaaccacagtttctacaacccattgatactaaatagtcgtatcctaattctacatctggattatcagaatctcctgaagaagaatgagtatcattaaaatgagttgatgttaatttgaacttcaggtcggtgatatatttgcccttgaactgaattggactttcagagtaaaggtagttgaccatatcagaggcttcattgacgttgatattggcgatttgttgcgatactaaagggtcaagaggtgatatgaaaatctcttcacctctttcacatgattcatacaattcatccatttgtatataattttattaaaatataaaatttaataacaattaaaataaattaaaataatatttataaaaataataaatatatataataatgtgcaataataatatgtaatgtgattctataaaataaaatatttaatatattaatatgttgattgaatatgtaaaaaaaatatatcaccaaattaaatcaagccattatcataataataaaagagaaagattattattttttgttcttttttacttccttggtgttatttcaaataagcctcttcacctcttttgctcatattttaaacttcttttatacacatttgtttataaaattttaaggtataaaaattcagaagatttcaatggagaatataaactcgttctatgcgttagaacaggtatcttctacacattatataacatgatcttaccattttcctaatcatttgaacagatagctatcctttatttattcattataacaatgttaatgtaatagatttatgcatgggtaagggtaaaatagcagctcaatgtggtcatgcctctattggagcttatgcagattccgttaggaataataatccgtatgtatataaatggttcaatgatggccaaaagaaagttgttttaaaaatcaacgtattttcaatattattccagttatttacaatgttattaataaatatttgatataatattttattaataggattacgatgaaatgagagagataaaaaaacaagcaaaattaaaaggtgtaaacacacatgtgactatagatgctgtaaattctatatttaattaattttgtttagggaaggacacaaattccttccggatcttgtacagttatcgcagtaggcccgggtatactttacacatccattatactataaatataaaattataaatatcaccatataacaatattaagttaattatactgtagtagtgtatgtgtatgccatatcttgatgttgtataggacctgaacctcttttggataaaattacaggccatcttaaattgttgtaatattctaatattttaaattttgttatacaattatatatattaattacaataatttactgtctataaatttctattccacgcccgatatctaaatatcactttatttattttgtatccttttgtttgcccacaattttatccttcagcatatttatttatgatttttaacaataatttatgaaaatatatcatttaccacaattttttaatatttgacactcactaaattatcaccgtataaatatttgaaaattttactttataatttatttttcactgatgaatttgaatagaaaactaggcaaagttgtggccaaattctcagctgctaccaagtctcgctctcttgctcctacgtaccgttacactcagatacagaaaggaccaggctttttccagaaggtataccgtaaattcatagccccttggtactttagagccatttcaggcccatatgaacgctggcatcatgcttgtttaaccagatatctgagagaacacggtaatactttacacatttatgtaaataactgtataaatatggttagggttgttgtacgacgatttaatgtgtgaaagagaaccaataattgaaagagctttatctatattaacgccagatttggcaactgctcgtttcaggagaatagccagaggtatgcaaatcagtatgttaaggatatatcctccactggaggagcaaaattatgatccatttataccatatttggcgccattcgttgaagaggccaagttccagttacaagaagaagaggaactcctaggttatcatccacaggatagaagactgttttgcggtacaccagattttagatttatcttatttatgttaatacaagtatattaatttaataatccctcaataatcgcctataatgtcaatattttgcttaggtggtacgacaggatttggagatttggagcctggaatgcactttttagtatcatttccatgtatttacggaggtggtatgggtaatatgaaaactaaataatcttaacagtttttaaaacgttaaattttatatttcccaaaattatacatttcacatattaatcatggttattctatgtgtttgttctcttatcattatttttgagtgaattgtgtaattatttaaatgtacaatttatgtgcataaccgtacccccatccatgagatctaaatagtaatatacagcttaaaattatgtaaaataaatttgtagtattaaatagtgtaattttaatttttaatacaatatatttcaagtttatgtcagttttttaatctatgccatttttaaagtccgtcgaaagattctataatattctgactttccgactctccgtatttattcaatacctgaccattttaataattttcattcttttttcaaaatattactatatcttttcatataccccttgatgtacacttttcacacattaattcacgttacccatcgtttagcaattttaaagtatttaatcgatggaggaaataagtaatgtagcaagattagagcgcttgttccatgagcgaaagttggaggaacttgagaaggacggcaagattcgtaaaccgcctcctcagttaaatgatttccacactgaaacgcccataaagccgaacattttcgactttattcctcccgaaattccacccgagtttttcgcaattgatattgatcagactttttaccacccagatgagaacatttttagtaagaatgttcaggcatttaaaagggttaagagtttagggttctctcctttcttctgcacaggtactcttaaatttatcaagaaattattataaatttacttatttaatttagaaattttacttactaatatcaatacgataaataaatacattgattaatgtgattataaattaattgatttgaatagggaggcctttttctactttgagatattcatttggagatgagttttttgaggatacgggatactccgggtttccaggaatatatctaaacgggacggtgatctacgacagtgccggaaaactaataagcctgacgtacttcccggaagtttttctcaatgaaatcctagagttcgcagtctcgaacggcgcagaggaacagtttctgttctatgaccctatgggtcattactctctgaaggaagttgatgagaagatactttacatgatcagaaccatcaaagtcccgaacccaaccatcacaactgtggaagagttgtcgaagaagaaaatcatttcaatcgtgacatcgtcgaggaaagttagactcgagaaatcattcctaggcgtgcactactcggtgaggaatatgggattctcatacctgatggagttctgcccccttggagttacaaaggccgacgcgattgtgacgttaatgaaacatgagaagaccagaccagagtcctgtgcatttataggagacggcgataatgatgtggaaatcatggaactcgttgacatgtcatttgcagttgcaaactcgacgaactttgtaaaaaaacacgcaaagtggattctccacctcaactactacgacgcagccttttcttacgtgatgaaccttgtgtataatattaatttgatataatcttatattttaacgcttatctggacctagattattatttattcgcttattcgtctcatatatgttgtgtggctcctagtcttccctgaaataatcatattttaaatttctggttttttattatttttttatcaattttagaaaaattataaaggagtagaaaagtgccacaacggcaaaaggaaaccatcaaaccaactgtatataagaacaacggtattttatgtaaattaatatttaaccaagtaacatagaaattaggaatcaaataactataaaataagatttctctgtgatttactaaccataaattgatatttcgttgacagaaaatagctgcaatactgaatgaaagaatctaacagttgggtattagttttagattttggatgtaccttttcgtcaactttggtaagggctgttagggaactaggggtcagatgtgagttagaaagccttgagaagtttaagggactagataagaagaatttgccaagcggagttttcctggttggaggtaacgaaagtgtctttgacgaggatgttttaagtgttgagaagtcacttttggacactctcaagggtcataaagtgcccgtactctcactttcctttgggatgatgtcggttgcaaagtcgtttggcgctaaattgagaaagaccgacaacaaggattacgttgttaccaaatgttctttgaagagtagtgagctctttgacagtgtgccaaatagtttgacagtttttctgaacactctggacagcgttgagtcagttccctcgggatttgaagttattgcgaaccattctgatgcccctgttggtctttacaactcagattataacctattttgcctttactttcatccagagtccgtagatactgaaaagggaaatacaatcttacacaacttcctgtataaggtctgtaagtgtgataaaacatggaacctccccgagtatcttgagagggagttggaacgcataaaagaacagtgtggatctgataagaatgtggttgcagccctttcaggtggagttgacagcactgtctcagccaaaatggtccagtcggtcattggtgaccgcttccacggcgttatggtcgacactggtctaatgagacataatgagattgcagaatgtgagaaaagggtcagaaaagaggttccaggcattaaacttactgtaagacactctcaaaacgtatttttcaaagaattatccggtgtaaccgaccctgaaatgaagaggaaaatcattggaagagtgtacattgaggagtttgaaagggcaattaaggaattgggctttaatgagaagaactgtttacttcttcaggggacaatatatccggacattatagaaagtgagcttaataggcgcagcaagttacctgtaaaatcacaccacaacgtcggaggtttacctgaaaggatgaaatttgaactcattgaacccgtcaggtacctgtttaaagaggaagttcgcgagctcggaaggcttcttaagatgtcagaggagacttttaatcgtcagccattcccaggccctggcctaggtgtccgtgttcttggtgctttaacacctgaaaatgtacaaaaggtgcgtatggctgataagattgtacgcgaggaggttgagaaagccaaggccgacgtttcacaatacttttgcgtttacttacctgatttaaagagcactggactagtcaggggacaacgtgtttatggaaccactgtagttgtacggtgtgttaaaacaaaggatttcgtcactgcaaagtgggtctactttgattatgaagtcttggaccgcatttcccacaggataacctcagaagttccaggcgttaatcgtgtagtacttgatattactaacaaggaaccagcaacaatagagtgggaataaccactttacatacttaatatatattttacattttatatacatattactacacaagtgtgtttatgtagtatttattgtactatagtatgtatacaccatgtagtatactgtatataatataccatgttacacaagtattacacaaaatcggagtgtaaatcataacaaaaattaatcttcaacatcgtttggaccaaataacatacagaatatgtacagtacgtactacattaatgttataattcatcattcgtgtccttgaggtcatcagagagtttaataccagtggccttcccagatagtattgacttgacgaatttattcaaattttcctataaacatatgaacatgattgagaaaccttggaaaactcggaatttaagggcaaataaacaccttttgctaaatttaagccaactacagccggaaactcctttaacccaaagactctttcccactgttcattctcaccaactacgaatcaaataagatagagcttattatatatattttatattatgcaaattgtctaaaaatacctaaggagtatgccagagcaaatggagcagtatgttttgaggcaaagttcttgagagtcttgagattttcttccttcgttgagggtttgaaaaagaacaaaagacaaagaggaccactacatttctctttcaattctgctactaaagtggcatgagttggaggggatagagccttatcattcttcttcgcaaatgctaaaatatcagcagcggttctctggccttcataattcatagcagttttagggttcttttctcccttgttaaataataatattgtaggatatccctataaacaaatatgttgtcgttgtaacccagtaaaagtttacatatcaatgaaagatttggattaaaagtagcaacgtagtaatatatatatataaccgattgatcaaacacaatggataaataataccttaacgttgaattgtgcgcaaagagattgatgagaggtacaatctactcttccgactttaactcctttactctttttaggcaaactcatccattcaggctcaaggtttttacagtgtccacaccaaggagcataaaatttgaccaacctaaagattacaaaggttagaagttagttatacataccactggttataggtgtcatcagtgactaatgagtgaaagttgtcagaagttagttgaacaacaaccttcttcgagtctaatcaaaattgtcagtaaataaaaagattacctttcggaatgaattttgcagctctgtgtttaacgtgttttttaaggtttttcaatgtaaaagaaaccaagtcatccaagtccctaccttcatcaacgtctaccacatcaggttcagactcctttcctaaagaaataagatgagaacgaattggtggtatattgtaaaatgtgtaataccatttccaaggaacagttttagtgatgggaatgacttaactttatatttctttgacacattctcgtctttaacggctacaacttgaaccaaatcatgaaagatgttagccaaatttttatacacttctgaaaactctacacatttcttacacctaaagagaattgcactcgaatttatcaattttatgtaaaaaattacataatttataaaataattgcgttaaaattaaactaatttgaaaatacgattcattgtaaaatttgactagtgtgactttaaaactcttcactttattgtcaaaatcgtcttctttaacctccaagaccttagaatccttgtaataactagtcccaagagcaaatttaaagagaataacacaaaataacaacctcaaaaataatctcgacattattcagtaatcaccagaaaccacaccaagtattttaaataatttatcatccacaccaattaaaacaaatcgagataactcaaagtgaatttaaaatataatgaaataatttatgaatagtttatattgaagcccaatggaatcaagtgactattatttttcctcttcacgaaatttctacacatttaattcccttttttatctttacatatttgtaaaattgtactttaaattatagtaaattatggaaagaatattatacatacacaactgtgttatgtcatggattctgaagaatctgaggtgataaatttagagtctaactccaaaactcctactagtcataatgagcgcagtgtctctaagcgtcattcccagagtttaatcagcgagtctaactccaagcttctgcacttagggaagactctcctctcttacaacactgaggagagtaataagtatgccattgatatcgcaaccatattcctgagttctatacctcctgaaggccatattccacaagatcttttcaattacattatatcaatttttcacatgtaacttgttttacttagatttaactcataatttctactgataaatgaacttttagatattttaaaaatgaatctgtggataaaattttcaataaatttttaacaatttctgctgcgacaagtcctaaactggtaaaaattcattcaaaatattattaacagtgtaaagactacaatattattttcagaggcctttgatactggaacatttagtacgcctattagctttaaaaagggattattctggcatagttaatgaggtcaccaggtatgttttaaggcctattaatcttgttttagacgttgtaatgagtggaatttggagattcatgaagttgcaaaacactataaatgggtcgtaaaacacatcgaaacactcactaacatctatccacagagtgttcctccagatttcatgtactttattacataattttactttaatattgatttaattatatattgtgtattaatttatatgttaatgaatatttagagtggagttggaggatgtactgttaacgtacttggagtatgagagattgccgaataagaatttgctcagtttgtacaccaggatttgtggttccaaatcactggacctgattaataaatacattgcagtgtttccaagaatctactttttacgtttccaccgacttaaacttcttttaaaggtattttattttactaatttcattaatttttaggattcaaattccgacaaatcactcatagtacctctttataccattcgttatatacatatatatatatatatataaatgtatgtgtataaatttgtaggaagaggatttgattaaattcgttgagctttcagggtattttctataaaacatacataaactatgtattgacaatggtttttagatattcctcactgagtgtggagtttttaaacttttataacagatttgtttccaccgacaagctgatccccttgttattcaccactgcagtatcttactattctgttagattttgtctaggttaccgtaccgcatttaaaacgcaactgggactgcttatacaaagctataaaaaatagaagagataagggtttattttataattttgtattattttatagataccgttatgggcaccataaaaagatcttcacttgtttcaattttcaatatcccaagtaatatattatattttaaactatttttacagacagtattggaagaaaaataactaaaaaggctcggaggtcttttttaaccgtggcttcactatttgtggaccaaaatcacctcaggcttctcactaatcaactccacacactgtaatatactaaacctcgtagaatagtacatagtatatcattattaaaacactttaattacttttaatgggttaaagcctctgtttcagcaatttgttcgtgttttctatcacttttgacacaaattccaaaatcaattctgagaggccgtacgaccgtcaggctgacggttgttcgggatcgagtacagtagcattcttttaaacgaaaataacgatcaaaacaaataaaaagttgtaataccatttatactatctaaatatacaagtatatattaaataccttgcggattaataaattcatactttaagtggactttctctatatgtttcagcagcagtttcagtttctgcatctctatcgtaagtgtgtttcatgggttcaaggtcagagtcgagcttcagacgctcttctgaacggcttctctcgtatgatcttctgtctgaaacgctcctagaacggctcctggtcctatctgaaggtgacctgtcgcgtgatctggggcgcttatcgtaaggtgatctgcttctgtcagaaactgatctcacagaccgacttctacggtcagaaagtgacctagacctcctctcatatggtgaacgggacctatctgacctacttctcttgtcggaaagagaccttgatctcctgtcgtagggcgaccttgacctcacagacctactcctgcggtcagacacggatctcgacctcctatcatatgacctgtgcctggacctagacctagacctcctgtattcgtcttttttgactctaatacggcagctgtcgtctggagtgctgagctctgagccatcgagtttcctaatggcatacttcatgtcagacttgtgcaggaagtccacaaacccctttccgtggactatatttacgtaaccaacgggaccagcctttctcatgtggtccttcaaatgctgccacctgcatccatgaggcagattcgatattaccaaacgataatcagttctataacaattttacatatatgcttatgtatatagagtataatatactaataactacgtatatagggtataatatgtaataagtatgtatataatctgtagttataagttatatagaatatctaaattataaattaaaatataaacctggttggtggaggatatctgtttgatctgtcacgatctcttggtctctcgtaactgggatatcttctaggtctcttttctccggcgaactcgaccctaagtctgtatctatcatattcgtagccgtcgcgagaatctacagcgtcctcagcagatctgacactggcaaactctataaaggcatatgaagtgtaatttgatgttttgccatgctttatgtcaatatcttttatttctccaaactacaaattatcattaatatgatataatcaaataattagataaataaatgaatgaataagaaaaatactttatcgaaaaggtcctgaatatccctttcatcgaccctgtcgggaagatttcctacaaaaacacaagatggtgaacgatttgctttgccgcctttgtaaaccattttagaatctaaacaattatatcaccgttatatcaaaaaaatattggcattattaatattaaattatacgggaaataggccgctatagaatattgagagttatagaataaaataagaataaaggccttacattcaaataatcaatttacgataaattagtggagaattaaataatttggaagctgagattctatatcaaaattaatttccgccgaattcagaaatacagaaaattaatttaatatgttgaaaaatactactacgaattgattaattgatattactgatcatatcattgttgggcgtatcagatacagtaatacaagaattatacaccaatttaaatctatttcctcttcaaatttatacaaaactaaattttacaaattatttatgcaaattatcacagctttataatttcatccaccttgataattatatcaatcaatggaaaatattatacagattctgaattactattaaattatcactttatgagatgtttcagtttatatcagtgctttatagtcaagtaatatcctcacaatatgataattttatgaatcttccttaaaattaaatatcagtgctgcatttaactaaatatcaatttttctccacaagtttagcagattaacatatgtaaaaaatagataatagtattttatacttaataaatcgggtatattttaagatctaattagatcaactacaaattcacataatatgatgttacgacatttataaaaaccaaaaattaacgtataaagagtcacaaaatgtgaaaaatatcatagaataaataaataaataaaaacctagtgatagaatataattatatatgttaaatcatgtagtggtacaaaatgtgtagaatctagttaatcaaaaatttcgggtctggattagaggaaaaatgatataaaacgaaagaaaatgtcagaaaataaaagattccaaaaaacgaaattaaaatatcaattagcaaaaaacagtgaaatttaataaatagggagtgtgatgttgtgtctgtgaatcaaaatgaattagttcattaatggtgtaaaaaattattatcccagaagaaaattacttgttttacaccgaaaagtaatttaaaagtaaaaaacgaaggttatagatgatttaccagggctctgattaattaagtacgtaacccaatatttattataaggcaataacatgcgcgggtagtagatcataacggtagatacataacggtccttgtagaaggtgaaatttacaggattataaatgattaaatggattatagaaatatgatacgaatatgaatagatgtcataaacttgtagattatctttaaagtttgtaaaattatgagattgagatttattgatagcggaaactgataacacttaatagccctgaaaattattttaaattgaacacaaccaatacacacctgagaagcttagatgatttattttaaataatatttgaatgagtaattttaagatatacatttgatttaacagacgtttgacaaagacgtcattctcaaattccattccgaaatttgttctttttcacttttttcacttgatgcaaatatctaaacacaaatgagtacactcgaacaaattaaggaccccgctcaggctcctgaggccacacctgatgttgctgagccacaattgcaacaaaatatcatccaaggccaattacagcccaaccagttgcagaatcaggcacatcaagtcggatcgaaccctcaaatggctcaacaggcacagcaacaccctatgcaaaacccacaaatgaaccaggctcaacagctccaacaaaaccagatgcaacagatgggacaacaagttggtccaaatcagcaggttcaaaacccacaaatgggacaaaatcagcatatgggaccgaaccaacagatgatgatgagaatgggtaacggagtaatgaacccaaatatgtactattatcagatgcaaatgtaccagaaccagcagggccagaagggaatgccaatgaatatgcagatgggaatgtctcgatttatgccacaatataacgcatacttaaacagagtacaaccaatgcaacagatggctccaactcatccgatgattcaacagcaaatgggtcatacccagcaggttcagaacgcaatgatgatgcagcaacagcagcaacaacagcaacaaggtgaaacaaaaaccgaagaaacaggagataataagccacaaccaatgagtaatattccgccgaacatgtacccaaatatgatgggaaataccatgaacccggtaggaatgcccatgatgcacccaggcggtatgggagggatgttttacggaccacgcctacttgtcaataacgcaattgacagcatcccctcactacgccttgcaaacagccagttccagaatgtgacacaggttctggatgccctggcaacacagtctaagagaagaagagcgcctagagcatcaagagagccaagagaagactcagatttcaaaaacgtcctccaagactacttcagcgcctcagacaactcagacgacgagtttttggtctctaggtcacttcgcctcaacgacggaagcagtagcattagaaggagtaatcgcactcgcaccaagactgcaaagtacgacgaatacaacgaaacggagtccgatacacaggaggactacgccaactaccccacgacaactgttaataatattaacccaacgggggtaaagagtaacagaggaagaaagaagggcgtgagttacaagaagccagctccagccaagcccgttaacccctattccagaagcaactacttgcagtttgacgagtcaagcgatgagtctccccagtttagcggccacgactacgatcccaactcgattgaaacaagcggtttatcgctgagacacagaaagcagagagtaaactacgcagagttggagtactcggacgaagaagaggtcgttgaaggggaagaagaagaaaagaaaagctcaggaggcattgaccgcgtcattaaccacagacaacgggaagatggcgagtgggagtatttaatcaagtggcaaggattcgcacacatccacaacacgtgggatgtatatgacaacttgaaggactacaacggaatacgtcgtctagataattacattaagcgctttaaaaatctggaggaacgccagaagtatatgaccctcgatgaaatcgagcaggagaacatagccctggggctccagaagcaaatcgatgaagactcattgatcgccgaacgcattgtaacacactacaaggatgaaagcggcaccatggtgtacctagtcaaatggcgtagttgcccgtatgaccagtgcacagaagaagacgaagagactttagtggagcacggcttccaagatttaattgactcatataagattagagaggaccgtatcttgggtgaggcggcgaggaagatcccctggaacacacattccatttcattgaccaagttcgagccctattacgaaacacccaagtacctgtccaaccccacctatttagaagacctcggatatacttccagattatactacaccattctagcagcgagagcaaaccgcatgaagactgatggtgcaaacgaaactggtgaagttaaggtagatggagtaaaaccccaagattctgtaaagattgaaataaccaattcagttaagcaagatgcaaaggtcgcccccgagatagatatcaagttgaatggagttaagacagtgaagactgagacagaacatgtcaagatggaactagaccatgaaactaactcgacaggctcagcccaatcgttttcaaattctgtacagtcagaaccaaacgcacaacaacctgtaaactcactaggcgctgaaaactcagttaattccttacaacaaggagatgctggcatgaaaaagtaccacctgagagataacgcccccaacgccttttataagccatcagagcccaggaagttgagagattaccagcttacaggactcaactggatggtaaaccgcatgaagagaggtttatcagtgctattggcggatgagatgggactgggaaagactgttcagacgatatctctggtgggccacttcatgtacaaggagtttttaattgggccatacttgatcattgtgccccaaagcacaatagacaactggatgagagagtttgaagcatggctcccacaggcaaacgcagtgtgctactacggaaacgcaacagcccgcgaaatgatcaggcagcgcgagctaacgcggattttcgtgccaggcaagggagaacgctacaagtgcgacgtgtgcatcacaactccgagcattatcaactccccagcggatttggaattcctccgaagaattagctggcaactgatggtcgtggacgaggcgcaccagctgaagaacaaaaacagcaagcgcttcgtagagttgatgcagttcatggcagactacaagctcctgcttagtggaacaccactgcacaataacctagaggagctctggacactcttgcacttcattaacccgcagatttatccgtactacgaagacttcagaagaaggtacagtgagattgagaacccagccgcaataggagagaataagcagaagcagctgctgtccctgcagcacgagttgcacgagttcgtgctcagacgtgtgaagaaggacgttgagaaatcgctcccaaacaaggtcgagaggattctgagagttgaactctcaccgatgcagattgactggtacaagaatatcttggcccgcaactacgaggaactggctaggaactcaggaggctcgagaagctcactccagaacatttgcatggagttgaagaaggtgtgcaaccacccatttttatgttacgagcccgaggatagacaggtatggctgcagggcctaatatacggaagcggaaagatttgcctgctagacaagttgcttcagcgtctgaaggagaagggccacagggttctgattttctcgcagatggtcaggatgcttaacatcataagtgagtatttgaccctgagagggttcaaacaccagagacttgacggaacgatgggtaaagaagtaaggaaaaaggcaatggaccacttcaacgacccacagagcgatgacttctgctttttgctctcaacaaaggcaggagggctgggaattaacctgacctcagcggatacagtgatcatctacgactctgattggaacccacagaacgacctgcaggcagaggcaagagcgcacagaattggccaaaccaaaaccgtacaaatatacagactggtaaccaaagattcaatagaacagacgatattagagagagctaaaacaaagatggtgctggacgcactagttgttcaaggacttaacaagcgtggagacgcagtgatgttcaatgacgacgggaaatcaggattttcccgtgaggaactcgcaaagatcctcaagttcggagcctcaaagctctgggcaactgcaaacccacaaacgaacaagtcctcttcaacagatgaaaaactggatattgatttggacaaagtcttgcaagaggcagagctaacaaaggagaatgattcagacctggcagcagacctcttatcatcctacactaacatcacggagttcagatatgagccgccagaaggacagcttgaggccagtggagaaaacgacaaggagttttgggaggctacaattccacttgaggaacgcgttaagctcaagaagaagaagcaagaggagttgttggtcatgggtcccagaagaacacgcgctaaggatactggagccatcgagactgatgactactcagacgatgaggccgatgcagatttccagcccagaaagacgacaaaagagttattacagtctcaagaaggtcttaagggtaagagaggccagcgcaggtccagaaaagctgttttgacgatcaaggataagatgaagatccacagaagcctaagcaagttcggagtgccagaactaagacttaaggacatacacgcagatactaaactcaacaaagttgacccaagagtcatcctcaacgaatgccagaacatgattgacagttgcaaatccaaactgaaggcaagtgcggaagacgaggacaaacgctcaagaaggagccagcttattgttgagatgggcgagatcaaagtcaacgcacaagacttcctggataagatgaaactacttgaaagtctggagcagtttggccgtaaacttgcaggaagctcatggagtatggcgccaaacgacgagtttgagatacccctacaggtgcttgaccagatgaacgagggtaaggagacatggacctcagatgacatagtcaacctcctcaagctgatcaacaagttagggtttggatactggtctcaaatgtgtgcagacaaggagttgtgtgtaggtgtactccaagacattaagcacgacaggttgaaaaaccgagcaatgaagcttctcaagattgtcaacacgtacatcgacccaacgtctgtgataacactgagtgacgaaaagaggctctcaactgttagagaagctcccgttaagcccaagaagaaggagtcggtggcaagtgataaggaaactgagataacttcggaaggagttaatgataaggttagagatgacctgagtgatatctacacactcgacgccgccgacgccaacaaggactcgacagacgtggtaaacatgctctcaacaggaaaactaacgtccagagaccattacgcaagtgccgttaagcatgtgctaaagtcctgcagagacgtcttgaggaccacgaagcgtctcagaaacacgtccatggatttcgccgaaaacctcaagtccgaagagttccaagcacaagttagggacacagtaaagaccgtcaaaagcgcactcgatagcaatctcaatgtctgccccgacgaatcagtagcaaacaaactcagaaccgcctgctggaagttcgtctccaaaatcatacagtctgatcaattccacttagaatcttactaacttcaaaagaatactacaaaacacatctggaatcttatcatatagaactagagctaatataaaaaagaatacaatttcaattctattcaaaaaaaattttcaaggattctacaaacactagccagaatcatactaatattatactatatgcacatgtacattttacctaaaattcgcattagattctactacaaattatattataaatgtattttctaaaattgatgtttaaattttaattaaaataattgatgtggattagagaaaagatcaattttggtatggaacctggtgggaaaatgagtctgagaaaaagtgaccagtgtttcaggatctagatactatgtcaaaaacaattaaatatggaattgttatggcttaatttcggccaatgtggactacagattgcagacacatattggacaaacctagcaaacaactttacaaaaaacttcagtgaaaatggatcgcatacaagtttttacacaactggaaaagatgtaggaattgacgttaaaaagccaaaattgtcatcattgaagccaagatgtttggtaattgatacagaaacaatcacatctgacgagattctgataaatagcaagcatagtttgttgacaaaagataatgtgttgacagacaatggatcgcacggagggaatttcatgactgtattcaataatttgggacagaagtactggaaatccatccaaagatatgtttttaatatgatggagaagtgtgaccactttgaatacttcaacttaacactaggagtaggaggatcatcaggctcagcactaggagcatatacggctcagatgttgtcacagttgtacccaaaaatcccaattataaccaacatagtcgatgatgaaaacacatcgcctgtcgcatcatacaacaccctgttttcgctttcagttctacaggaacactcgaccatgatcatacccttttcaaacaataatataatcgaatcaatcaagaaaacaacagacataacgttcaaaagtggaagtaaagattactttaatccaataaactcagtaatatcgaactttttacaagaattcaacaacgtgactgtatttccagactcgcgctttaacaggattgatatcatcaaaaactcacttttaccatttcaaaacatgaattatacatgtccattaaaatcgccagttgtagagccaagaccaaattgtaaataccacttggaccagctttatgaggacctattcattggagatactagaatttcaccaattccaacacactcagatatgttgccaataaccatttcaattttaaacggtggaaattaccgaaacttaaagtattcgattacccacaagatgagaaacggtacattcacctggaacaaagaagaacctaaatctagcacgcatgacattggtgaggattttaaaccaataactacaaggcatccactagtcgctcttagtaaccacacgggtatatcgcactaccttgacaaggtttgtgacaacgttgagtcgttggttcacagaaatgcgtttttacatcaatttgaaggtatgattgacaatgaagagatatactacaagatgatgaagttgagggaaacatcacagatgtgtaagcagcaagatgctatgattaagaagcagtttcgggatgtagacttaaaacatgaaagaacatcaccgtagatgaattctggttcagttggtgtacttaaagattttaaaatggactaatttaatagaatatatttgataaaatattctttttgataacattaaaatactaattaggattttttattatcgtctggactcttagtgaaggtggaaagtgcaaaggcgttgaattggaacacaactttctgaagagattcaacctgcctgagttccttattcatgaggtccaaaacgttacgcatcgtatagtcatcccccagaacattaaacggttcagtatccctacttttagacagagtcgcaaggttggttagcccctccaagacctttttaaggctgtgtacagctttttcctgaacaaattaataaaaatgaaactaaccatgctttcttttatgtgactatcagcttgagatatctttactaacgagggatctaagaggagatttaggttgtcaagactgttctcttgggtagaggtgtcttgaacattaacaggcggtgtctgaggaaaattatcctgtacaccaggcattccagtaaaggagttcatagtaccaacagtagccatgggattttttactggaccaacagtattgttcatggcactaacagcattactcatggaattaacagaggcagcttgagtgaaatctgctggattaagagcaccgttttgtagagcttgattttggtttgatagaactgctgcagtaaccgccttcttgaggccttcagggtcaaccgtaggcactgttaccttaggagaggaactttggattacatcttgtttatcttgaggagaagctgattttacttgaagaaaagaaccatctggtgacaaatctggagaactacgcctcagagcagacacattttttaaaaactgtgagaaacaggaatacaaaaaggctattgcgatagtatttaatttcataatcaaagacaattaaaatttaatgaaatgggaagatgtacataataaaatctcaaggtaaaggcagagttgacgaacacattggacggaagtgataggtgctgaaaggtgctttaataggcgaagtaaaaattaagtaaaaaataaatagaaataataattaatagatgatatttggttataaatgaaataaattgtcgagttcattaaaagtcttgagtgaatccttaagacgaaggagataaacctaggaaggtttattaaataacgacaatgtctattttaaaatattattaaaatacacattaataaatatttaaaattaattaagtaaaatatatatttatcaggttaatacgataattaatatataaatattatgagcctgtcgtatccggaacttgagcagagaattcttgaaataaaggtatttattctattatacaactaatttttattccagaaaaaaatatgtaaaccaaactgtaagaaatgtaaaagagcattacatgaaagcattgaaatcaaatctaaaatatttaattcaagtaaaaagagacatttgggatctggagatgaatctaacaaatactatgatgcaatagaatacacatctgattcgttgccatgtatttttatttcatcacattatgacttacagataaatatcgcaaaataacctcagataatgggacggtaactaaaatttcaattgtaagttttaataacatactatatttaacaacgatatctaatatcattttcattaggatatatataaacaaaaatcacctctagaacaaggtaatgaaataattatccgtttatatttattttaatagaaacttcaaacacacttaaaaagaggaaatctgatcgttcgtattctaaaaaagtagatgaaaacaaacaaagttcaaaaagaactttagaagattataatataactcaaccagagtatccggaagaaggtattatattgcacataaaacacatttttagaagtaacacttgataaaaaatatgaaaattttgtaaagaaaatagatcttgcaactctaacacaccttataggctctggttcagaagaacctaaaagtcctgttaggatcagtgaaccactattcactataccaacaacttcagaaactgttaaaccactagaacagactttaacacaccaaccagttgatacagctgatgctctgactcataaaattcctgaacctattcaaaaggatattgaaaaaccacaagataaagtcgtcgaaccttcccttacaattgaacaagatgataaacccagagtcttatttacttctgaatccaagacctcagtggatgataaaagcccatttgacattctacataaaataaacgcaccgatacctaagggtaatcccctgttcgctcctacacaacaggattcaaatttatttaagccgaaaactgacggagcaaatttcgtttttggtcagtcacagccctcagttaagaaacctcctgaaccagcaaatatatttgcaaatcagcaacaacaaatgcaacagaaccaacttatgaatcctcaacttgtcattccaggattcggtcaaaatatattacctcaaaataatggttccaacccctttactacaggccaattttttagaagcagaagaggtcgaggcagaggcagaggaaggtgatcaaattatttaaacataatgttttttatcagaatcttgtaaatttattaattttttacacttttcacatcatagttgatatacacatcaggttatgattccagaatctgttattttaattaaattaaattctgtttttaaaaaaataatattaataaaaatgaatgtagtaattttaaaatgttttttactgtttgttataaaaatgaaataacatattttttaaacaatgaacatatcacacatactgtttaataactcaagaattaaacattcagcaaggtttttaaagccacccggattctttaaaagggctgaaatgagagagaaacctcacaggagaacagggccatttgagaatcctgtgagaaggtttgttcgtctccgagagaaagcaagattgttctcacaacttccagctccaaggtaatttgttttcagcgacttaaaatacacagacatgtgccaataccaaagccaatactaccaactctgctaaaaccacttgaatatgtacccaaagtatcacctgaagttttggagagaaggcttgaattcctacttggagataaagcaaagcaacaacaactccacgcaaaaatgaggccagggttaactccctaccaggctgagttatatatgtgggagagacaaatgagagacttgaggagggtatacagagctcagtacttccaaaaactcaacgaggtgactgaagaggaaagacttaggcaatacaatctgtaccttaaagagaccaaaggtatttataaactcttaatttaaaaattagaaaaattcgctaagagagaggaaataagaaggtcaattcatgaagaaaaaaagagaaaggcggtatgatagttatttatttcgtacacttatctaaaaattgattagattttgagggacactatggcaattgaaaagaaaggtttgatacaccgtaaaaccattccaatatttttttagttactcaatcacttgagcttggtagactttcaagcaaaaagatcaagaatatatattggctaaataagctgcaaggagccataaattatgatgaagacaaaaataatgttaacatagaagagtaagttacataaattatctaataaaaatgtttagtataaatgtcgcgaagctggcaagtgacctgggacatccagcggaagattcaaaggaaatcagacagaagatcatgacggggaatctatttttcaggtaaacaataagattctttattggacattgtagaaaaatactgaaggaatcgttcgaactaatgcccgaggatatgttcaggtacgaagttatggatgaagagacactcacaccagaagaaagagcaaagttaacatatggagtgctaacaggtaatgaaaataagtaataaatagcatagatgaggaaaaactcgaacttctggataagaaaatcaacattcttaacgaaaaaatcgaccaggactctaaattgaaggggaaatcaaaagagaatctgtatattcagctaagagatcatctagaagctgcaaaactggcatatctggtaagtgttaaaaatattaatcgaaaacttttgtcaaaatattacaactccatacttatttcaaattgttaatggaaaagaaataaaacagctacaaaataaaaatgacgttattataaaatatatttaaataataattaaatgttgatcttttttattcaggagaaaagtgtaaaatcatgatagtggaaattgtgtaacatattagacttcttaaatctactgctcactatatatgttgtgatatatttaaaattatttatttattatatacatatatatttgggatgaatcttaaagttaagactcttaagaacgtccaagttgatgtcgacgttcccgatactgcatcagttgaggatttaatgaacaaagtggccgaatcgttccctaatatgcaagcggaatctctaaagctaattcacgctgggaaaatactaaaaaaagaactccttcttaaggattattccgacattaaggatggagataaagtaattgtcatatcgtccaagacggtgagcagaattctatacatttacatagttcaaataataaatataaacataaatatgccttttagcctgatccttctaaacatcaagacccaaacagtcaaccttcctctacaactacacccacatctaaggctccacaaccatcacctcttgacaatagtcctcaccaaccctctagtgggcataatgtttctcaacaaacttacgaaaccgtgtcgtctaagttggttatgggatcagaactagaacaggtaattcctcttacacattaatgtaatttatagagcattaatcgtatttgtgaaatgggttttgagaggccacttgttgaacgagcaatggctgccgctttcaataatccggaccgagcagtggagtttttatcaacggtatttttacctttctcaaaggtttttagggaaacattccagtttctaatatgccaaacattgatcaccaaaatgtgaccgcaccagaacatgtatgttttttagcaaatttgttaatttccattatcagggtcattctggtggcgaggatgtgcttcaaatgatacagtcgcacccaatgtttgagcagttgagtcaagcggttcagtctgacccacagctgcttcaacagctgcttgaaagcttgggccaaacgcaccctgagcttttgcaggtattttcacccattttaactcccgtcagactataatccaaagacaagacgagtttatggagttgttaaactctggagctggtgccgaagccgacccgtattctaacacggaacacaatccaaacataatatcactgacaccggtggaaatggaaagtatagaacgtcttgaaggcttaggattctctagaccggcggttatcgaggcatatctagcttgtgataagaatgaggagcttgctgcaaactatttactcgagaactctcatgattttcaagaataatacctttatggtcaatctattataatgtattgattctatttcttataaactagaattatccagtaatacagattaagtaattataatagaattttcaaatatatactataattaacgaaaaatagaagactaaaaggtagaattaccactgtatgataactgagttaccgaatcaatataacatgtataaatttgatgacaaagcgggaataaaaataaaaaataaaaaaattaaataatcttgaattataaatatttggaaattaagaaagttatgctagggttttaggttaatatatataaggaggctaaaaatacatgtgtatttgagatagaaaggagtaataaaggagtagcatgaaaagtgcaaagaataaagcaacacaccccaaaatttttcgttcagtagtggaatagaaaaggagaaatattaaagggacgcccattgatgtgccatgatgttgaacatgagataatgggggttaatatcgaggcagaataataaatcattttgtacaagaatttcaacctcccatcccatttcatacatttttcatgtatctttatgatattgtataataaagtttttgttctccgtatgatattaaacaatacaattgccatacccaattgaagaattttctaaattcatgtttaatttattcatgatactccctccattgattacataattctatatgaaattctaaaatttcaagctatttttaatcttgttatgacttgttaagagagtctagttcaaattgttaccaccactgctatcatagtcaatagtttctttcaccaccaataggtgttttatcgtaaacataaattaaggatatttttttaacaacaaatatttaattggaatcttttttcaatttcgcaaatcgtgtaattctaggtcaattccgcagatttacctgtctagaatgaccagtgactcagatgaagtttccagaaatggcgacttgaataatttacagaaggatgacgatggtttccaaaaggtcttaacacccttcgagcgaagagtattgaaaaagaaaactgccgacttcaaacaagtgtcgttggcagactgtaatacactgcaaaactcaattattacccgcctgaaaaagagaggtttagatttaacaaacgatcccgatcatacgagtttagagtccagcaacctggaacttgaagaggttcatgaaattatagccgacctcgatgaagccattaatggagtcctataccaggctgaaaagccagaccaaaatctatcagtgactgaattggaaaatagaattaaagttgctaagaatacactttgtcaaatgaagacgaaaaagaaggggtctatatctaaggaggaactggacaacgcaaccaaggaaactgatgtgtatgtagcgtaccttcaacaccaaatgacactaacgaaagagtaccaaaagttaaagaacgcccaggtttctttactaaagcttaaaacattcttaaaggattatataaactacaaaactcgtctaagaaattctgcttccaaggtcgagaaaaacaaggtgacaacacccaccagtgacccaaaggtgttgggaacaacaaagaggaccgtagactatgtgtacgactttattaaggagatgaaggaccgaaatggaaggtccgtggatgtaaacgatttaacgagtcgcgatttcagagtagaggacggaactaagttccagccaccatacacttacttacagaagctaaaacagaaatttgaagtctttatcgacaaaaccgggacgaaaccactattattatcagtttatgggtgtaaagatgacgtgaataggtgtgtagaatttttgtcgaaccttgacctatcgccacaaaacaaggttcccatgacattctccaagtatcgagtgctgctggaaatggaggacaaatataacgtgctcttgaactacaattcaagaacaatggacattttaggcaagagttcggacgtgaagtcgtttttagaatatgtggactcaaccacaaaagacggccgggaaaaggacaaggaactcaacaactcagtcaagtccaatgacgtgactgacgtcgctggagacaacgacaagttgtacgactactacgtccttagagcgctaagtggcaagttcaggccaaacgtgcgtgaacttgagactgagtacggagtggggataaagttcgacttgactccaagaaacggattcgccaaggtttcatttgtgcccctgctcaataacacagttgatggctgcgtgaagaagttcaccaattacgtggatgaatatgggtacaaggaactgggaaagctgagtaacgaggaactatcgttcctaagtgataatgatgtgcttaaaaagaggtacagatcacaacacaccactttggttaaagtagctgataaggtgtttgttgtagggctgaaaaagtatttaaacttcggctttaatagggctcaaagcctgttggagtcaagacaacttccgccttataagttcaagctcaccagttctcagtttaaccaggtcaatcctcacctcaacactctccaggaccagaagggagtatacattaccacgacatcgaaccactcaaatagcaaagaacgagaaaaggaacataacgacttggacgatcacaagagcgggggtgagaaggacgtcactctcctactttacggaagcgctgtacagcagaaggactgtgtttcagcccttaacgagatgataaagtgttttgtgacgagagaactaccactttctggagttgagtataatttgttgttggaagagaagaataggctaagtgagtacgaggctaaatttaagcttaagttgtctctatcgaaaaataccttaaccctttctggacccaaaccacaagttgaagctgttttagaagatcttaaggctcttttctcaagagtggtctattttaccctcgaccccccaacaatgccggaacttatgaaccaagcccttgtttacgcagttatggccgtgccccaaaagttcattggaaagataatagggaaaggcggctctaccctaaagcacattttgctccaaacctccctcaataacctcattgtaacaaagtcctcacacttcagccatgaagcctcaaacagcgttgaaaacacgcacctcctaaaccacgacaatcccaactccactcataacaaagctctccctaataatgttcgcgaccacaaggaaaagaagtccaaaggtaagaaggaaaaggaagtggacgtccttttcatgattggaagtccccttagcgtccacaccacagtttcgctgatcaggcacgtcctcgactctgacgacgacgtcttgttgacgaaggcggattccagaaacttgtacgacgagtacaccagcaagcactcgttcatgcgcagaacgatctcaaactactcctcatccacgtcttcatcaagcaaatacaaggctgatgttaaactcgacattaacgacatggataacttcccctcattgtattaaatcgaattttatttttaatttattacttttatatttgtaaattgttttatttagtttatttttagtctttttggtgaatatttagtgtatttagagtgttttagttaatttattgtttaatgtgtttattaatagtcttatattacgcttaatttcctacttaagaagtagtactgttaacgtactggtacactttataaagtaatacattagggtgttagagaaatggaactagaagtgagtcagataaagccttgtaagccacaggcatctcatttaggaattcatccttctgagaacgagtccaaccagaagcgagcatattcaaaacgtactaaaaatatatataagaaatgtaaaaaaacctctaaattttggcagtcagggtcgtaaaaagcagatttcatcttatttacaagtcgaaggtgagctctgaagttagtaagtagagtagtcttggaaacagaccagtccttgaaaaaaacataacaatgagatagaaaccctaaaattattagtgagtgaatagatcaattatggatatttttggatgattggactgatgtaaacatacgatatggactagtgtcaggtaaagatatcagaaattcaatatattcttgacaaggaacggataagggaggcggatcaacctaagaaaattgagtaaataaaataaacaaacgcttaatagtgacgagatatatgcgatatcagtttcaagtctaggtaaaagctctgaaggacccatttcgttaagtggtctgaattcaggcctggtttcaaactctttgttaaacacactagtgactcctgcgatgttagttaaaaatttcaagccggcctaaaatgataattatggcatggaatatagaaaatacatttctatcaaagttctctgatgactgtttcttaagagttaagggtttgagggattctgtaatctccaccatcctgggaatgacttcctgaacaataaatcccctaagaactattttaataaattaaaacaaagattagttaaaataaattaatgtgtgccttttaggatcaatgtcatagatttcagagccagggttgttgaaaacaagagcatcgttgacactcgggctcaatctttgccagtatctcatacgaagttccctgtggagctgtttagaaaactcggaacgtctttttttctcatctctactaatgcgattcgttactttgattttcctaaggtatggtctagggttggaatatgcgaatgaggattccgagcttaaatatatacattttgccgaaattatccaaattagtatcaagtttattattaaaatcgattcaaaatacatataaaactaatatacaaaaaatgaatgaaaaattatccacacatgtgtagtgaagagaataacattaagtgtaatatcattaaattaagtggaaaaaaattaattacatggcatctccaggcattcctgaatataatttaataatagtaattttatatttagaatataaatttaactaatgtgcacatttttacctttcttatcggcatatagataatgaagctcattaatatcacgacgatcaaccaatttagtccagccatccttgtgaacgtgatatactacaatagttattatcttagtatatagaatatgtttgttgatttaatagataaatggtgtaattgagtatttgttaattatagttatcatacagttgacaaatcctcctgagaatccgtctctatgtccagcttggtaaatggccctggttccaagctctacggcctcttcaagtgacatatcactaaaacaattattacacagccatataaaattttgataatatgtaagtatgcaattagttaggttgtaaaccttcgatatccctggtcaataacaccgtaggcaaacattgatccggagcctacgctaaagagcttccccttaaccctttcaccctcactgctgacatagtatagaccaggcccctaataaatactttattttattgggtaacatacgttcaagtcatatccagcgatcattgtgcctgctgatagtccgtaacccttgaaatagtaaaagatgttagcaaggatctgagaagcagctccaacagagatacgacactaaaaataatataaaatcttatatattacctgatttctaagctcatgtaatctgcacaactttgctaggtgtctttcccagtatgaacagtccgcagctccacctgccatagttcccagaagatacgagtttatctcaataactttactgacgctctgagttgatactattggacccatcgacgctctactatcaactgcaaggataactccgtgatcaaaaataaaccctagcgttgttgttccctttttaaaattcttagcgttttgtgcttcctgggccatatatgtgtttaacatattcacctaagcagatttaaggataaataataaaaaaattaaaaataaattgaaaaattgtaagaatatacctccttaattggaaacatcttgaatccgttccttagaatgtcagttgcgtttcctgactggatgacaacatcgtcgcaaggccttaaatcactttcttccattttatttaaataaataaattagtttttaaataaaattgaagtatttgtcataaatataaaatttaaaataatattagttcaatcaacctattgcccaattgcaaagttaaataccaaaattaataatcaatacacataatctaaatataaacaaaagttattatcaaatttattttacgatattagttgggttaatatttccatgaaatcgtcatactttgtgtattctgaaatttttattatattattcctacacatacctttatgtttattgaatatttcatacagagtgtatgcgttgttcttatttaattcttctaggtgatttaaagctataatactcttaatttttgaatacaaaatttcttcatatacactaaatcatttatatttcgcatttttcttacccgaatttattgtaacaatctaggatcttaataatcgtattcaactcagtcttttcctgttccagcagtccaataacatcttttgaccattttctcattagtttttgtataactatgagtataaggttgttttcaccaacactctttatttcattaaaatcatttaacccatttgaaacacagaataatttggttattgcaacgagtgtattacttaaatctatgaggtttaaatccatcctaattgtcaccatatgttcaattatctttaagagttcttgctgtccaagttcaaatgaccattttgagaatgacaccaataggttcgaaacaaattccattttaaaacactgtaaggtggttagagatcgaccctttattgactgaactatttcatctatgatttcatggttcaatgatatgtttgagttaattagagtagattttatgctcccaagggcataaagtgaattagtgagatcacttggagatgaaaatctaactcttgaaactatttcatctctgcattcattctgaatatcattaaaattattctcaaatatcatgaacccattcagcactctcaacaactcaaatatattacacgagtttaaattatttactaaactacctacatttatattatcaatattgttaaactaacttgaaaaggtgttgaagagctgttcgttgtagtatccaagggttacaaatgcgtttataattacacttagttcctgcggagtgaagttgaaataccgaaaaaactttagtatatggttagaaattttagataaaaatatcttgtcagtatcctaaatcatatttataataaaaaaacctactccagactttgatattgcgtttagtatcatacacatttcaattgaggtcctaaattcgtatagccttgtcgagatttcaaattttaaaatgttataaaggtctggtgttagcattttcccttttgagtatgctgataaaaccatcgaaagatacacctacagtaatattaaatcaactttaataccgatgtaaaaaaagagactttctttattatttgaggaatcaaaagttcaaacaactctttatcatatattctggcccttgaaaggccatttagtagtaatgctatgtccattggcttaaattccaaatgcctctaacaaataattaacaataaaatcatctgttataacatacttcctttgattttaatagtattgaatcccattccgatctgttaaaatttaaatttcgtgctaatttatttgcgtaaagtgatatctgttccactcgatcattttctaaaagaaaaattaaaataattcttaagtaaatagcgttatacctctgtagaaaggccttttcatgcgttctcttaattcatacttgtcgtatgaatggaaggttgtgaagtatgaaactctgcgataaatgcatcgagaatcgatgttaaaaaacctaggaacatttttgattttcgaaatttgagaactccgaaagttaatcattacaaaaacatatttgaaaaataattaaaaatatttaaacaaacataacaatgaatatttttattagaatctacaccacttaatacaataataaaaaaataaaatttatattttaaatgtgttaatagatttagatgtaaaatatattataacgtatcaataaactccataatagattattatctgcttaaaagtctcctgaacaggataaacaagaaaaggagaataaatgccacaattaaggcaagagcccaaagcgggagttttaacccctaaaacaattattattataaactctttggtataataaaataagaaacgaacgtatcctcgggctattttattcatatttatcagagtagtgttgagcgatagggaagcagaattgaacacttttgactaaaaattaacattttaagtgtaatttgttaaactaaccacagaagataagtgagccttggattttttgagttcattgtgcatattcgtactaatctgaatataataattgccaattagttgagtaaattgtgttaaaataacaaaaaaatcgtttatatacatatatatatttatattaataatattttacgtacattttttaagctatcaactttgcattccaggtcaactacgaatgtatcatcggaaccgaaccggttaatatccgataccgtagattgcgatagatgtttatttgatttataatacgacatgtttaaaaatagtacacatttataaattaatataaaaattaaaatattgaaaaataaattatgaatgacacatgttactatataaattgggtagattagttgataaatctttaaaagatattagcaaaaattaaacagcattatttcaggtaaatttgaataaaaatgacgataatattcagcgatgagcacaacatgaaaggttgagaaaacctccaccatcacgaagtgatatatttcctaaaatgaaaataagtaaaaatatacatttaataatgatgtgatagctaggataaacatacttctacttgagactcccattggtcctctctttactccttgtaccttgagaaatatgttacatggccaaaataacttatgtatatactatatatataatggattattacccctgattcaatgtcaaacaagccatttttgacattttcgtatattaactcagccgttgtcaaaaacgcctataaaatgtataaagtattaacacttacagcctccacgttgtaatcacctttagcggaagtctccatgtaaatgaggtcattttggtcagcaaattgcttgcctatatattgtttcatcattgtaatgaattaatgttaaataaagttacataatttattataatgtattgtaccttcgtgatattcaacttccctagatgcaacatcagttttattcccgattagtatgatcgacatagtaggagacccatgatctctgacctcttcaagccatttggtaagatgttcaaaagtcgatctcctaaacatttgtaaaacggagaaatgatacctcgaaatgtcgaatacaagcaaagctcctgctgctcctctgtagtacgatctagtgattgaacgaaacgactcctgaccagccgtgtcccaaatttgtaacttaatttgttctccttgtacagttatgaatctggttccgaattcaacaccaattgttaaatcgtggtcaggtttaaagcgtttgtctgtaaacctcaacaggaggcaacttttcccaacacctataaaaaaatatatttttagatataataaaatagtaaggaattaaatgtaaaggtataattatatgattcattacctgtatcaccaataataatgtacttgaaaaggtatttatagtatgacattgcgagaagttgagttttaaaaaatactagatgacaacaaaaatgtgaaaaataatatatacacagaatattagtacagtcgagagaagaaggtgcaaatagtgtcgtcaaaatgtatcaactagtaaacatttttattttaatgagaccagatataaaaaatgaatattcctaatctaatctaatcaaaatttctatatagattgattatctacttaaaaaaattgtataaattcgtgaagttatgatgggggtatgaaattacaaaaatagatataatgtgttggtcatttaattcaaataattattttttgtatatttttactcattttataatgatacaagaagttccaattgtaggttattttaattaatacacacaatttacatgagattaaacatcattatattttaaattttaaccaatcaaatggcttaagattttttctatgataatttttctttcatttatgttagaatctcctgttatcttaacatcttcctcattaaattcatttttcagaatcgacgtcaatatttccgtttttaaaattcccaaacaccctttaattctcaagttcaattctagattctctaaatcttttatttcctaatcacttgctatttaaaattgtactaactataatttccgattcttttctatctgacgattgtatccctacacatttatctctcaattgaccatttctcccatcaacatctgcttcttttagcagaacttttttcttgtccttctaaatacacaaaggtattatttaaatcaattttatctaacctttgctccttttattaaatctattccgttatgttccttcctttcatttaatgaatctctggtgaattttggaactattaaacatttgaatacactaattgaattctatgtaatatattctaattaatcatacaattgactagaggaagatagttgaattgacttattctcgtcttatgatttatattagattctggcctagattaatattttagaacaaattaatcatgaattatttattttttactttttatcattatcattaatgtttaatgatgttactgtatcttgagtggtgatttgcgataactctctgttgccaacaataaccttattgacaaggctagcgtggcctaaatcattcccgtttctatatattttggttattaatgtttatatatcatatttaaaggttgaattttactttatttggctatggctctctattaacgatctcagatccacaagggacatcctctgactgttgaccatttataaatattgaacggatcaacattttaaaaattttaatcaaattaaagtattaaaacatgtgtagggaattttgtaaggaagtgggaaaataatggaaatttgagtgaaaattttgaaccaaaatcaatgtaaatacaatggaataaaggaaatgaactttatttatgtatccattgggtaaatctatagcgatatgcattccttggattttaaaaatatttttaaagcgccaaagttgtatatatattcctaattagatgcaaattaagttgaccgcatgtctgctgcccaatattattctatatttgaggggaaaatattataatttattgtttatgtatttatatattttaatttatttgtaagtttataacttgatcttgtactaactttgttttaatctgatttcaaacatatatttgtgtttatcgtattatttgtttcaattttaaattttaaagatattcttctaaaaaagataaatttgataaacctggatttaatattaaattataaatcactaaatccatagcgagaatttaaaatattttagtaactagttctcgttaatttcattcaattatatgatatatgtatagtagccacattattatttattagtaagatggtagaaaccaccgagagttctgacaccaaaaacttctataacgcaagtccacttctgactgagagtgactatgagtctctgaagatattcgcaggaggcctcaccaggtcgacaactccagaggacctgaaggcgtacttttccaagtttggagaggtgactcataccgaaatcgttcgggataagaattcaggtaggagccgcggtttcggcttcgttacttttgccgaaagggaatctgtaaatacagttctcaggaagtctcacacgatagacggcgttgaagcggacgttaaattggcggttagaaaggaaaaagctaagattcttgctcctcaatacgaccagacaaaacgaatcttcgttggcggagtgtcagaaaagattaccgagtcctacttcagagactatttcgctagatatggacctatcgcatcctacaactaccttgtcgacagagctacaaacaggcctagaggatacggttttgtgatttacgaaaacatggaagatgctgaaaaatctgtcggtctccacatgtcgcttggaaggaactgtgaagctaagtttgcccagcccaaaaattccgaaaaggaggaaaccatgatcaacgactttgattactctgcctattactacgcccaggcaaacctgctctactctcagtacctatctcaaatgtacaacggccagacaaccactgaatcgtcaaacactgacgagtatcccactacaaacagatctagagaatcaagtccttaccacaagagagatcgttcatatgaccgtaaaaggtccagaagaagccgttctaggtcgagatccagatctaggcacagatcaagatctcgatcttacagccggcggagatacagacgctgacactttaacttaacttctttaaccttaatatgatacattttataaaatttacaatttatttattaaacatataaattacataatatattttattaaattagttatgtttgtttttaaaggattttttaatgtgttttggtatcttatgttctctacgttccctattcatctgttttaccatccttttccagtcctttggatcaatgccttcaggaattttcccgttaaatttaacattatcattctcagatgtcacatcaggctgttcaggtgtgttatcatttgggtcaataccaccatcaaacaaataatcctcatcattggtaagcttaactctgttgttaacctctggtaaattgttttccctctccaacttatccaaaacatccacagttaatgatgaaaggtttagatgattaagtgaattccacgaagcctggtgagaaataaaatttacactttcgtatggttctttaataaatattacaggatccttcaccactaacaagttatatacatgcctgtaaaatgcgttgtaaaaagctcttttcttcattatcacctcccttaagtggtcaatcttggcattttttgaagtgtaaaccatcttgccaacgtattcatccacatcgtcgtcaaccaagtccagtcttaaatcaatattaccaagatcaaggtccatggttatgaaattaaacagctgaaaagaagttagtatattgaaagagttatttagcacggtattagaatggtcacaatcaaatgaggaatctgagtcttcttcatttggagtatcaaatgaaactgtggtaaagaaagttgttatgttttcacaatctctcttaagaaagtaaacagcgtttggatgatcgttttcaacagcctgggaaacatctatcacaaccaccttagagtctgaatagagaaggttatacgaggaaaaatctgcgtggatgagtttggactcttggtacaatattctcatgattgaaataacctgggagtagataagaagccattctgataccggaagttcacccaaatcctttaattttggtccaacagtaccatttgagtcatggataagctccatcacaagaatgtggtccttaagtgctataggacatggacaataaatccctgataaggatattctacgaagatttctaaactccttttcagcccactgactgaccattttacgtgggttcttagtgccaacgtaggatctccgaaacctaaattcaccctcaatgtaccgtgatctatccttgaaaatcagtattgaggttttgtaaaccttaattgcaattctatgtttagttgataaaagagtgccttcagattcgtaaacattcgcctccttgcctgtgcttataactccatagatataatcaaaaatcccacgtccatggagtctttttaatctaatgtatgttctcttatctaaaacctgctgtacagtaacccttttatccttagtcaggcccttctctaaggaattcctcttgtaaattatgctatttctagccaacctcgactcgtcgtttggagatcttttaaagaataatatcccggtgttattttcttcagaatcaacactttcctcctcggaatccgggtcagattctgaagaaaagtaggattcttcaattggcatctaaattaaacaactattgacttcaataatgtgaaaataaaatactcattatttatttaaaataaaaataacaaaacgaaatgtgattttagaaccatatagtagaaaattaaaacattttatggcctaattatgattctacctaagtagtgctatattgatcaactttttaattaaataaatttatatacattttaaattacatttatcatttccatttttacttcttcattaatttttcattacttcctcatttatcacttttacatttatttgggatatacgccaattttgatgctacagatatttaataaaaattttaattttactccataaatcttctttaaataaagatgttttatttttaactgacttttctaaattttggatatcagctctatgaatatgttcggcacgaacatacttggtcaaaataacaaggacgaagactatgttatgtccgaaaacagaactgacaccagcgatgatcagaacagcgaggttagttaaggttttttatagctttttagatgacctggatagaatggtactgcagtttaaagggcaatcagtactacatccaggtggatgagtcatttataagagacgagtttaacctcgtgggtacgtacctaccgatttatttgttttcaggcctacagtaccaagtttcatactacaatagcgcccttcaactgattttggataattacgagaatgatttttacgacgatgacgactacgaaagcgtctctgagaaagggaaacaacaccagataaacacatcagcgcagctactctacggtttaatacacagcagatttataatgacttcgaagggtatgcatctgatgatgcagaaatataaggataaggtttatggcttctgccccaatttcagttgcgaaaacgcctcagtgctacccataggactagttgacgctccagctcatcacaccgctaagattttttgcccatcatgcaatgtaattaattacctattaaacatgaaataaaatgattacaatattaataggaaacatatcacccgcccaagtcaagtagattaggactaatagacggagcttactatggaactacatttgctcatttatttttaatggttaatgaggcagttgtaagttatttaacaatttaaatgtttatagattccgagaggaccctcatattattacgttccgaagatttatggataccgaataagtccatacgttaagaaaaattcaaagtaagcttacacatttttatctttactttagctctgttgaactctacgactcctaggactctcatttaacaacagtgaatttaataatttattaccctctattttcaaatcttccaaatacgtgtcaattgtcctgattattgcctcaggagggatagactccaagtctatcttctcctgttcctttgtatcagatttgttatcagaatttttaacttcctctacattattgtcatcttcacttgtactacttggtgttttcttttcatcctttacttcgggtttagtgatgctaaattctttttgcagatttttgaaaacatttacgaacgactcttgtccgtttttaacaaaatttggaacctcagttttagccatcttcattttcgagtttatttctgaaatatcagttccggacacttcaagtgactctgaaagttctggaaaatattgagatagtataatttaccgttatatttgacttcaattgttgcttttatgttttccagcttctcaattacagcgtcagaagatttctgaaacctagaaaaaattgttatttttacttacttgttggtgtaactctggtctattccctcaccgattgcagagaaatgactcttaagttgggtttcaaagtatgtaatatggaagtttacgaggtccttggcatcttgaatttctagttttacctgaattaatggttactagttgcttagcaaaccaacatctgtcgtggtggtgggcctgtcaattttacaagatgtgcaagtctcccatccagaaaggctgctttgaatgaaggatgctcctgaataatgaaatattttgattttatactaggtaaaaggtgtaggaagtatgttagtggttaaatatactcagtttccggttcgaagcagtcagcgatggagagaagaaaaatgaaatgtaaagtatcaaggtgatcattgttactatgcacaggaataatagaggtagcattgagtcttaatgtattaatattaagtttaaaaatttgtataaacaagaaataagatatataataatatatacattatagactttatagtacacgttatattacaagtataataaagatgtagtttagagaatatataaccaaataacaaataaaacaaatttaaataacatataatagttagaagttgatgaaggattagggatgtgccaagttcataattgaatcagaaaacaggaagacatgataggaaaattgaacaaaaactgaatttactataaaattttattcatggaaggcacattaaaatgaggaaggattattgtgtattgaaataaagtacaaattctgcagaggaaaaaaaatgcctcataatttatttgaaaaagtaatattttcttccattcttttttactataaaatttaaattcttttatcacatttacttgtaatttttaattacattttaaaagtatgaaaattgtagttgaaagacacacatatacatttatgtgtagaaggtgacatgtcgacagatgtagagaagccgtctgaacttgcagtgaatataaacacatcaaatatccctaaagaagattccctaacaatatttgataaactcgaacaaatatgctgtaaattcgaaaataaaaaattttacagaaaatatagaacaaagtctcagacattgagtattccaaaatttaattataaatttaaaaattgctacaactctatagatttcaatactattccatatagcccatcaacaagtagattagaatataacttttttgagattttcttcaacttagttaggaaagggttcggaataacacagatagtaggatctagcggttctggaaagacttctatttgtcttagaatagtcgaaaactttccaggaattacactttacctggatacttgcggctcaattgatccatttacagctccacatacacctaagttcatcccactcagactttacaccagtgaagagttgttgttgtttttgagcgatttagagtcccggctgctagaagataaggagttatcttccaggcttaaaatacatgcaagatcaattgaaatgataatagtggactcactttggtttattgatcatttggataagtttcaacagcagatttttttatttaatttatcctcagtactcaggaggatatcattcaattttgatatatgtataatagtgtgcattaacaacagctttaaacagaacataataaagccgtcaataacacctgaagccaaagacgaaattaaagatacagtctcaagttcccagacgacaaagcagcctaggaatatatacataagatggaattctaactgcaacgtacaattgcttctatcgtataaaacattgaatttcagaccgagtagtattacgttagaggacgctgaatatccactgttttacaggataatgcaaatcaactccggaacatctaacatgaaatttaggttcataataaataatgaaactatatcgctagaggaaattttacactagatttataaataaatggatttatctacaataaaaaacgagcgggttcattctcctcggaaactaaatgatatatattcatatcatccatcagacgagttgccctggagaccacctgaagttgaccagtttaggaatttcctaattagctcaaaaacaagggcgactagagattataactcaggtataaaatgagactaataataattttcagggtacagaaatttatgtataattagaggccagaccggaagcgggaagcttacaacaataaggaaactttgcgatgatttgagaataaggttaatagaatatgacccttttaacgtagttcctaatactcaagtagagtttgattacactattgacagcttgataaggttcctacagagttcactgtctcgaagatgtttgaggacaacggcacatgaaaagactactacaaacgagaaaataatagttggctcgaggaaaattaagagaattaaatctgagtttagtacatacgatgggactggttcaagcgcaggaccaggaggcatgagttcaggcggtccagaggaaggtcagcttgttttaatttcggatttaccaagaggaattctaacctgcaaatactcaaatttataccctttgcaaagtttattgagggaagtgctagtgtcagatataatgtacccactggtcattgtaacatcaaactcaaatgaggactatttaatactaaggcggataatgccgccaaattttttaaaaaagtcaaagtgcctaataatcaatattaaggaaatcacaagaactaaaatgatctctctcctaaatataaacaagaagaacaagtttctaaactacttgattgactcatcagcaggagatattcgctacgtaataaacaatatgcgcttttatcaatgtgacccaagtttggataaagacttggaatgtgattcagaagacgaaacaattaaggaccatatactggagagaaataatttgaacaactttgacttactgggtaaaattttgtacaataaaaggattccagcactgttgaaactcagaaatgagattccagatgaggaaagaagcggagattccacatttatagagtgttttagcttatcaaggccgatacatatgaatgttcactcatctcaggcttcacagtgtagtaacacgacaacaactccagttaagaagaatgataactcgccacgtaatagccagatagccccaagtagattaaatagtagtagagaaagattaaacccagattctatgccggtgattgttaagatgtatggacttgtaagtgattttgattttacaaggccaatgtcatacacaaagtggccagtactgactcctgaaccagagatggtcaaatttaggcatacctcagataaaatgttgccgaagcttacgaggccgttattgtactatagtccagaaaaaatggttgactcaattaaatcagagttaaactactttgcaagctctattttcgataattactcagacctctacgggcacattgatgactgcgcagcaatgactaggcactttgcaattgcggatgtttataactcgaacccaaggaacataaacgaccctgaggcctcaagggtatttttaaccatttgtataagagcagcggctgactgtaacatatatggcttcgagagccataagcagaagttccacacattcattacacacaagtcaaagtcggagtacatcagagctatgtttcacgatctgaggtcggaatctataggaggtgacgttactaagctctattctaaggacgttctgtttacggagataataccggcactttcaatagcaactgtaagccaaaacgagtcgagtgaagagattactcaaactttatccacagatgatgagtacaatatcaatgatttaatggataaagtggagaagattctggaaggaacgcaggagacggtaccaaagctgaaaacactcgagcaggcgaccattttcacgccgaaatttaacgaaattttacaagaaatcacaaaccactactattcatgggatagacactctcaggaatctttataacactaatgtgaatacagttttgttatataagtagataaatattatgcaacgtttgtacgccttagtttctgtagtaataaatattaaaagtgtaggaagacagcggatcactttgctataaatatgagaaaacgttatttataaaaattaaagtacacagggtggaatttggtccttattttgattgattttatatttgctggtgtccccatacgttcaaatttgccttctatagtacgcgacagtttagtatctttattgttgtatataaattataaaaaatcttgtaacttttatatatttgcttgtatgatagatcttcccattaaatcactaaacgcgagtactcaatacacatgttttttgacctagtaaacatgaaataaatcagctcaaaatgtacgaagaagattttgaaggaggtgacgcaggagcatcacatactgtcccagtccaggctggagccattaaaaagaactcgtttgtcatgatcaagggacacccttgcaaggtcgtggaatactcaacctcgaaaacagggaaacacggccacgccaaagcaaacataacgggtatcgacattttcaccgggaaaaaatacgaggatatatgtcccacatcacataacatggacgttcctcacgtcaagaggactgaaatccagctcatcggtattgaggacgatggatttgtcacactcttaaaccaagacgggtcctgcaaaacagaccttcagctgactaaggatggtgagggaaattttgatgaggttgctaagcaaatccagacactctacgagtcagggaaggaagtcttagtcacagtactgtcagcctgcggacaagaaaaaattgtaggatgtaaagaattatcttaacttattccaaatgctaaaatataatacaatcattaatcttctccattccacaccttacatcattatgtataccacagtgtttacgcaatcacttatcattatttatattttttattttttatttcagccttccttaattgtttataataaattttcaagtgaggtggaatctcatccatacatcactagttgcattttattaatcgcaaatcttgatcaattatatattataaatataaatggtggaaactaatactactgatcccgtttcagtggctgttgctgagctagttggaatggcagatatgctccgaaggtttccttctcaaatccattagattttcttttaaattaacgttttaatttgttttatttatgtttatttatgatttttataggatgagagactcttgttggaacaaatgtatttcatctgttcgtaatccaagtctagatgtcggagaaattagttgtacagaccgctgtgtaaataaggttttataaaatttgttaatgtttctttagtatcttgatattcacactcaagtgggatttcagctccaaaaaacgtcacaaaacatacaacaacagttataatcctacctaataccgttttaattgtaataaattgttattaaatatattgtatataatatacagtgggtatacaaaattgtatataaacgattgtgtgtaaaaaattaagacaataaatattatacaagtggtttatacaccactaaaagatttgtgagcccagaatctgagtctatcacagatgccgttaaaggaaagatcaggcctaacgtcaatgtacacacctagtttattaggatcatcagtagctccttcataaaactccaaaatatacctgtaaaaatatgtattaatatattaaaaataaggaaaaaataagtaaataagcgatctacgttaacaaacctcctgcgattgccgcatctatcaactgtccagtcgtgcctatcgaagggtaatttgtacccagttatgtagtttaaaattgatttaaaagtatgtttatctttatttccaacgaaatggaccagaactggattgttgcaagtttctttgtaaattgattcatactccatgacacgctcccaagccttttcattgacaatattgtgaatctcaactatcgtaggaatcaaattagcatcaacgttgtgacctttattaagagttgatttgtagaattgttgttgtgaaggataagaccaaagagaatccctggaaggaatggaggatttcgtccttttagagcaaagtttagaaagtattacaggatcagcggagaatttgggaccaacgtggtttttagacgaacaataagaccccgtgtcatttgatgatgggcaactcatatttattaaaactcattgtaaaacataatatattaaataattatacacagtagttgaacttataaagaatatttaaaaaatataaaaatttgtattattaaaatataaattaataaatatgattaaaatataaaaatgaatatgaaaaattcaaatagttagaaatttactagaaaatcattatcaaaaatattggggacatatgaataaataaattatatattttcaattattttattttaaaatatttttattttattataacgaataaatatttgtatattttctctaatttaaatatcgcattaccataaattatttgaagattccaaatgatatacaaatcattcaaattatttaaatcaattcatcacataactctaaattaaatttaaattcattataatacaacaattatttcattaccttaattataataaaatgaccaagtcaagcaaaaacgattctaaacttaaaaaacctaaaaagaacaaatccaagccagataaatcaaccaagaaaacaaggtccaagaagataattaaaatatatgaccggaagcctaacataaaaaagggtttgaaatcctatgcgtttgtgaacctccgtaggattccagttcctcctaatcgaatgactccgttacagaacaactgggaaaacatagtcagaacagttgtagagcgcttggagttacaaatacgtatgtgtactaagacgaagtgcgttgaagtcagaccttcccgtgaagggatggatttatcacttcttcagaaggctcaggactacttaagagcattcatgctaggatttgagcttaaggatgccgaggcaatactaaggctcgaggatatatttatagaaagctttgaaataaatgatgttaaaaggctccacggagatcatttatccaggtgtattgggaggatttcaggcaaggatgggaggactaaacatgctattgagaacatgaccaagactagagttatcctggccaataataagatacacataatgggaagtttcaatagcattaagcttgctaggcactcaatttgtagcctaatactgggcagtcaaccgggaaaagtatacaataatctatgcaattctgcaaaaaggctaagagaaaggatttagaagctaataattgaaaatttaatatattattaattattctacgtacataattatatttttaccaaaacaacatctgataaaaatagcgtgagttgataagaataggccaattggtatacacatgaatttatataagtgttgtgtgattattaatataattaatagttaagactggttagtgttacagttaaatttgacactgaatactacctaataccccatccacaaatgaatcataagatatttgatagagaaaacaagttataatcactaatatatgctcaatttattcaataaattgattggaagctcaggttatattaaaacacatttttgttttaattataactctttatagatccagatatatataccgaattctacaggaaagtctcattatttttaaggcaacccatatttaaattatatcattataattattttcaaagattctattactaaattgtgtcaacccctgatttcaactttgaatctttttatttaataagattcattataattatgctaataactttattaacttaattattcattttgattgttaaatttattttatgttttagatggaaaaggaatcgaagttagtgccatttttgtttcttctgtcgttcaacgcacttcagttttcaacatacgttctaaagttaccaccgctatttcttcttagcaagtgttttctaggactcgtgtttttggggggctttttaaggcttgttaggggcgatagatcaacaaagttaagggaacgttttcatactgacttgttctcatctgattcggtcgatcgggtagtcaaatttctctctaggaaagtcaatgttgtctttgttcaaacaaagtctgttgttctgtgggacgacccagtgaagtctctatacactctcgtcctattatatctgttaagtgaacttcttaaagtcgtaccgtcagttcttgtcgtttttgttctcgtttgggtattctttttatacttttacatgaacgacttcttaagaaagaacgtctacacgtactttgaaccttacgtaaaagaatgtgtaaatttcatgtataaaatgtatagcagcgttccaaaactcaacgaaaacaaactattgtaaccaactttaaaaaactcaatttcttcatattttatctttacatgtatacattatatatgcattgagtgaatagtctatttaatgttttaccagggtacaatcagctgattattagccagtggtgtataaatgtgttatgataaattatcagaatatataataaataaatatctaaaatgaaaataaagcaatttggatagaaaaatcatagaaatagttcgaggaataaaatgaatactagggagccggtaaatttaagctttgtaggtgaaaactatttataaaaaccagcaataacattcaaaccggaaaagatgtatcgaagaaaaagaagaaaaagagggtaaaattaagggcttaacaattaaatgtaatttaaaaaaatgatcaatcaaagatttataaaataacacgtgggaataagaattattagatttgtaaggggagaagaacgaaataatgatccaataaaattaaaaaataaagaatgaattgagatatctactgtaaaaacaacggcttgatttaatagcaaaattgagccgaaccataatgtgttatcagtgtggcaattgtggtgaaaaaatcatacaacaaatcgtgcgaataattagcataacagtctgtattttattaaaataatattccagactctttatttcattttgtatttcattttttaagacatatttcacattataattgtaattttattaacctttgagaggcattttaatttttcacatttaacatttcaacctgatttaatatttctcgatttacaattttagtcaatttaggttctaatttttaagcatttttcatgtcattcacagcataacatgatcttggagttactatgagttccaggccaagtgtatttctaattatacccttagctcaatcctgaacccaatgtggacttataactcgaatggattcaaataaaaggaattgtgattaatgaaaataaactctgaatgaccgcttcaattcctatatcatcttcttttgaccctgatagacacgagccgtttttgtgtcataagtttaagaggcggtgcccaattaactacttttacattcccatcgagtgcccgtttatgttgcaatgtgccgacggacgttgtcctctatctcacacggtatttgaggttattttccaccccattttacataaaacgaagaagtgtagtttggcggttaagaacaaatgtaagttcgagaagaagtgtgccttctaccacggtgaaaatgaccgacttggcgcttacctatcatggctggtttgggagaaaaactgggaaatgaactcccagaatacaagacaaatgcttcaaaagtttggtttgtcgagtaaaattatatccaaagttatcctgatgattaacacgaggatttgtcaaaaatcatccctatcactttatccagagatgactgactatattaaggttcttgaggatgaattaaatgatttgatatctacttgccaaactagtttagataaacagaacaagccaggatttcaatctgttgcaacttaatgggatttaaaatgaggattttccacctgagaacgattttaaattaatttaaattctccaaatgatttttaaaaggagaattgagagttaatttaaattttgtattaacttaatattttaagttagtgatacaaatatatatatatattccagtatagaacaattaatattacatgttatattctaagaaatttatggattgctccttcaaaaaacctttattaaatctattgttggattgtagtgtagaaataccataagttacatgattatttagataatttatcaatgtgttaaattccatcagtttgttgttaattatatattataaaacagttcaataatggatgattttctttgcggattccctccaccgcctccattctataagaactactcactcaagtgtccagacccggacgcatcactggatgctaagttagattcgataaaggaccagattaaagaagcggaaggtctagtttttgactattcgaaacttacatgtttcgagggtcctaaaccacctagtccacccacagaatcctggtcttccttcggtaatatacataaggtaacatttatttttacttatttgtctttagtttcaagaagaagaacgcacactggattctgaaactctcatacctcctaatcctggcactactgaccttcgggaacactttaaatttctatactcccagtttatggactcactactaacatatcttgatctcataaagaatgtaacactactttaattatgctataattatcttataactgcagttactatcttgacattactgaaattgtaaataacatcacaatattcacacatttttagatgaataatgactcgatatccgagattaagaaattcatgaaggtatggaacttgtttagaacagtgttcagatatatgtaaacttgcaacacattctaacgtctttatggaaaaggcacagtgaggatgaagttgtagaaatgctaaagtaagaagccttatttacagattctttagggaacaacttaaacggagaaggaagtacgtggatagcatgaaaatgttagttttgaccatttaaaatctgtgtagagtactgtctcaagcttcaaacctggtcaaaaaagtaacataaacatgtaataaatgtaaatcacaaaacgcagtataaagattattttaagttaaatgtctttaactcttgtaatgttttcaaatcctactcaatatattcattagtaaactgtaccaaagccttatcctcatcctaaacaataatattaaatcttgataataatatagataaaattaatggtattaatgtgaataaaattaatagtgttgataatggtgattagattgtggaaacatacatctgttggttcaaaggggtcaagttcagcctcttcaggagagtcaaaggcagagtcgtaaaggtactgaaacctattcttaatttcactatagtcactagtcggaatatctatgagcctaaagcacttgagtgggtcgtccctgggaactttaagaggacccttagttgaactggaccacttccagttcttaacctgttccatccacttctcctaaatcacagttacgaattacaattttcgtgccttggattcaggtgatagtcttgcctttaacttgttctcaatccaggttgaattccatcccttaaccttctcaggaataggcgcaggagtgttattaggtgtagcatatctaaaataaattttttaacctcaaaaaaaattaactaattggtagatatgaaaaatactttgggagccaatcacattttttagggtaattctcaatatagtaaatcagtttctttagagcagcttgtgttataacaagttgtctgtactttaaaaggttataaacattaacaccctaaagaaattatagagattatgaaaatacctccacggtttctctgcgaactgaaggaatgttggctgttgaccacctgaagttctcgttagagtcacttacaccttcgaaaactagcaaagctgagttgcatctgtcgcctgaaaataaattatagctagtaaaagtgtgtacctaggattcttcttaaattttgaactgcatatttagtcttgtgtgatgccattaggaaggaatcaacgacttgaatctgggattgcgcaaatttagccgataacatgatctttaatccggtgtaaagagctaaaaatctagttaaaaagataagggtacttcttctctgtatcttggtcctgttatcatgtggacgaagtggatgtgcaaagactcccatatacttcccaggcgacttcttccagcctattctggcctttccagtcttctgctgttttctccattttttagtgctacccggccactaaattatcatgaaaattcctcatttttagataaacgtatgtgacgggctaacacacatacctcccacttatacagttgcatatcctcggaataacctgccttggctcttctataaaactggtaacaccgatggagtatatcagggcggagtggaaggccgaaaatatcatttggtactcttaggtatctgattgcctccttcacatctttgcgatcatagtactcgaaaacataaacgggcagctccaaaacactgttaaacccaacggctaaaaaggatatattaaaatttgtctacctggaaatgaccagtaattcctagtcagagtagatatatctattatttccccaggacgccgaaccacctcggggtcatgaattgacggtacggaaggaatattaacagtctaaaaatacttaattaaacccataaaatagtatttcaaaggcgtttgttaatggatatattagtacaaattgttgataaggaatcataaaattattacaaattatacgtgtgtagaggaaggttgagttgagtttaaccgcttcgtagagaggatgaaacggttaaaaaaattaaaagttttaaggtttaaggttctaaaccctaagtttttataaatttgaaaagaaacattatacatatataaaagaatctaggaagatgaataatgaaacagaactcagaaattactaaaaattgataaacaaaattgtccaaaaatgttaataacaattagtaatataataaacaataaaataaaacaaactgtaaactagtgaataatataaaatgaatgtatggttggagtatgtatattaaaatgatgtaaaaattgagaaaaatcccaacaggtcaaaagttaatcaataaagtcaattttattaagaggacaaaagaattaaattagcccttgtaaacaaggttgattcttgatacgatgtgcattactaccacaactcccatgtaaatcaaagccagtagaagcactgactgttggctcctataaataaaattaaaggcataaaaactaacatttcaagtccggtactggttaatccatagtatttttggaaaccagagtttggagggagattagtcctagtaccagtagattcactggtagttctcctcctaaaataaattttaacggaaatttaaaattaatatatggttaataccttgtggaaacgcgttgaccacccaccatggtagactgagctggctgtttcgacgactaaaaacaaattaatttaaattaacaaataaatttaaagttaaataatttactatatcatctaagattattagaaatgtggatcataaaatatggaagaattaatgattattgtaaaatatgttcaattaccattttggtatgtataaatttgatataaattaagttatttgaataaaaaatataatttaaaatggattaatgggaggatggaagttatgaaagattcttaacaaaaaataaattcagtgatgtacctgacaacttatgatgctaatattgtgaaaatacgaagaacatatttacaaataattttttaatatcgcttcgttaacttgaatacattcagaatcacttttcagttccttataacaaacttaactacttatattttagatttattcttcctcgttcataatattatcacgttaattaatatatgaaaacacatgtatttaacactttcactgtcttttatttatatgtatatatcagattttatctacctatgatctatgctctgtttgtttacggaatgaatacactgccatacacatcacatcgtgtttttcgtgataattttcacaaccacacaattaccacaaaatattctaaatcttcggtcatttttattaatttgttcgtctaagaataacgcttaaatctactggatattgaaatattttttcttccttcaaatcctggtgtttgtaggaagaatattgaatcgataaaattcgttaaagatctggataatattggctttatagtcattttattagcgggattgagattgtaataaccccggattaagttgttattgaataactaataattcagggtaaatgctataattgaattcgtatgtagtggagattgaaaacaatctgctattaaatcagattgtttaatatttagactcataataaataagaatttgttgtttaaattgtaaattttggtagatattgcgagataatatctattcattgcatgaggaataaaaggttgggatgatatcataattggaaaattgaatacgaaaacaaaagcgtgacaggtaaattgaaagaataagtgatagataataaggagaaaatattattaattagtatgtgtagtaaaaattcattatctaaatgtatattaatatgtagggattataacaccatttcaagggaatagtaaagtgaagataaaatcatttaatataaggctgcaattatgtggtcttataagtttggattttgagaattgttttattgtatatttctttcatattattccttgttctatgtatagagtgtatgacatgaatgtgtcgaccatgtttggattcttaactctattcaggaattattagaaaatttgaacctcaattactggaaattttttatttttttcaattacatttcactggttgattaattgttttcatttctgagatatccaactttagaacttttcaagctcatcctgtctttatctgcattaatatgttttatactttagttttaggattttaatattgtaaactttattttggatcagctctttatctttaataggattttggacgtagtagtatggaaacggatattccgagtctatataatcgtcttttatctcttctcaattgttcaacacctcacttataacctaaacgttccaaaatccttctggatttgacggtagtttcaacgttttttggatttcctctgatttagtctcagtttaggttgttcaaactctcgaagattttgttgttttacggaacagaaataatatttaattaataaaattttattattcttggcgtgtttagcataatatcatcgatttttgcccattgcactatacggatctgttctgtgacactctcaagactaaaataatttcaaagacttaaaattattttattcatttattgggattataaaatatatgaatttgagataaaatagatgataattatgtaagaataacgcaacacccattgattctcactttattacaccactcgctacattgttcgtttccccactttttctataaatatatatgagccattttttgccagttagtaagggatttaacccgcgcaaatctcaccctttttcttccaacagattcaagcgccggtgcccctcacaatacttttacataccaatagagtgtccattaggcagaaactgcgaagatggtctctgtcctctttctcatacaaaacttgaggtgatatttcacccggtcctccacaggactaaaagatgtgggatggccgtgctaaacatatgcgttttttctcaaaggtgtgccttcttccacaattccagagagagaatctcctcgcatcttgtctggttaaattggcacaggcattggtcgctgtgggatactgatccagagtccttttctcagagattcaacgtagacttagatatatcgaataaatttttcataatgttgcaaaatagaatacaattgcactacatattaaataaacaagaaaacagcctaaacagcgagggaaactttgagggcggtgacagtcagtgcccaagttatgccaacgagaacgtagtttatcccgacggtgatgataagaagatgatgaatttagagaagcagttggatgcaatattggaattatgcacgactcctgaaacgtctgcgagttctttaactccggaaataaagcaatacttgcaactgacaccttataacagtgaaatgcaaaacgccaaccacagtgcctttgaattctacaacgataatttaaatcagataataaactgagacggaattttaaattttttaaaaaaattgacctttacttattatgattagatcaccataccactatacgttcactacgtatgttatacaccataacctaacatgatttatacattacaccgtattacgtttatcgtgtagtactttgtactctgacttaatgtattctttatacattctttactctttattttagcccttacttacccgtctatgttgcctttttcatccccttttgactatgtatattccatcctgtttattgcatattgtacctaatatcccatatacatagactattaaacatggaaattatatacgcggaatcagattattaaattgctaccgttctactgatatccatacaccacaacaatcaagcctaaatcgtggaaattgtcgtggaagaacaggataaatccagtttttccctgtacaactgcaaaatctccacttaaatcatctgtaaaacatgatattaaaattttcttattaagtttgcttgtcattttgcaccaattgtagagcccgttccacgtcgacattccaccagtgggtcaatttgaattatcacaacccctgtactcagcattgtacccaacaccataaaaagccaagaatatcataaatagggctcccacatagttagttgggaccataattatatctccttgacttccatcagtgaccatctctggaaacccaatggctgtcgaaatctcgttacacaaatagaacactatgattactgccgtagacgtcccaacttgattaacgatatcttgaaataactcaagtactctatagtgaagataatatatgaatacattacggtatactagggactataatacattatcaagggttatatttcagggttttaaagtctcttggaaggagtaagtattttgggagagaagacggggagtaattagtttgacagcagaatgatatggtaaaagtattatcttcggtggcatttgactcgattgagctgatgtgaaagaaggataaaatattagtatacggaataagcttaatatcgtcggttgcgggtaccgccactatgagattattaaggagtaacaagtcatcgttatacacattacaatacatttccttgtgcttcattacatagtcctcatctaaacaaatatatacagttggtaaatataagaagtatactggttggaagtgcgtcttttgtgagaggctctatgatatcaatgtatataaagttgatggtgtcggagttgactttaatgacatggtttctccccaagttatttatttcaaaatacttattccagttcatgttatttatatatttcaacctattatagtcgacctaaagaatattatcgtggtattagtgattaccgatataactccttcaagtttggaggatgagaggatcaacatctcgtcatcggaattcttagcgttttcattagtgtctgaaagtttaccggcctcttgagccttatcgggtttgccatcattttcattgtttataattatattattatatgccaagtttgcgatgtttatgtcaatattgttcctttcattcttgtagtgtttaatcagctcctggtgtattgagggggagtctatcaccactatcacgctcactttatatattttacacagttttacaatcatatccttgttgcactcatatggtgcattaattactattcctacgaattatataattttttatagtatgtacccgaggatttaataacgttatcgttgttgtataacattagttcaacattcacattcaataacttcatcaactaataatttattaaaatattctaaaatattaaaagtgctgactaaatcatctaatggttacgtgtaagtataggaattcgttgtcttggtagtatgagtagccgtagtagtataataaagggttagctgcagtgtccatattatcatataaaacacaaccgaccgtgccaggatataacttaatactactcttatcacaacttgacctaaaatgatatatacataaaatacaataagggaattttacgtgttttacctaggatctgcatcaataaaaagaggtttccacgaaaacctcaatgcgtaattacacaaaattgtacaaaatgaagattttccactagacggtgaaccagttaccaatatctaaaatatattaatacagtaataaaacactaccctgggtccaaaagtattattaatcgttgatagctgtcttttaatattcagtaaatttattatattcaaatactccttcattatatttatatcataagattcatattcctatagaaatccatgaataaattaaataattgagtaaattaaataaataattgaattgttaggaggtacctgtaatgttgaacctttaatttggagagtgcagccactccacgtatatattgcgattctttcaccttcatttaggggtacttcgacacccggaactaactctttaccaaaaatctcagcgctctcattctcatttttatttatcaactaataaaacaattaaaaatgttaaaacaaagaaaataaatagtattttatttgaaaatatgtaaaataacctaaatatttagtagaagaaataccgttatggaaggttttagaggaatggaactgaagctttcatttgtgatgattctcagctctgagaaaggtggtaagttatacgtccgtataggctgcatcatatttaataaataaatatgatatatataaagtaaaataatgatttatattcattattgggtaaaaaaaatatgaaatcacattatattaattatattgttcatgataaatagaaattataatttggtatttaaaagatttggatactggcctccacaatttaacaataaatccacgattctcaatgtaatacgcttacaccctaataccaatattacataatattaataataatttacagttgccttctggtaaaaagtgttttgtatttattggaaaacgggattgtgatgggaaattggagccagtattatgttttattgacaagtaagcgaatggaacacactagtatatgttcaggttaggaaataaattaatgtggctaaacagagaagaagtacatcaatttgataaattaattaatcgcatagaatcatatttcgaattattcaaaaaatgattcaagttaaatgtatattatagtaaccttttcttaagattaatttaaattacacacattttaatgtttgacacaataaatatttataacatattaatttattaattttataattaatgaatccattttttaagtagaattattataacacattttaatgtaaggattctcatttttaatgttctagaatgatgtataatttttattgtagtttattttaatataatggaattgtttatatattaatgttcaatttgttctttataaatttggttgtgttgtatttggtcaattattgtttttcacttcggtttattaattataaagtaaattctttgtttataaataattttagcactgaaacgagtttaataaatgatataaaatttgaagagtatgaaaattcatcaagatttattaataaatcgaaggaatcctcatcgaagggagatgataactcgggtgaagttgaggattccagtacacatccctctgaaaatgtcattaataccacaccagatgttaatagtgacttgacaatatcaaaacggatggtaaattccattttgtcacttttatcatcgttttacgagccggatttctacgacataataccgattttgtataatataaaggatgaagtaatcaacataactgaatacatgggaaatacccaagttaaaacatcgcagagaaaacacccagagaaaacgaataataaactaaaagataaaacatataaaataaatgaagaaatgtacgataagataaatggaatgttcatgactgatccctctggagaagttgagagtttagttttgagcattccatcgtctattatgaacaggttgtatcagtcctcacattatggacataaaggcgaatctacgattcctcagatacagctggtaactttaagttcaggatttttcactaaactatatgaaatcgcaattttcccatacctttcagaactgtttcaaaagtgttttaacacgactttggataacacatttgggcttatgcataggattataactcataattcaagtgaagagaatgatgtaaagtctgaattttatactggaattgataaaattccaggatttctactcactccgcagctggaaaaaagtttaactgaagagtttgaaaatgcatttcggataaataaacttaaacctggtaatgatgttgatttgactgtattctcaaaggattcactgtttttcctaaccgtgctcatcaagtgtatgaaggatttagtgtactttaactcatccctgaagctgctggaacagttaatagggagaaaaccaacagataatgaaataatcttttcattctttaataaatctcagacaaatttaagtaaaagtaataaagcgggtactgatggttcggaaaataaccctcaaaaacagaaatcatcccaagaatttaatgttaaaaaactggtacagataataaccgatagtgaatttgagatagaacatagactggacttatattttacaccgttcgttgaagctgtgactaacatttttaaaaagaagataaacagcgaattttttaaggttttgtttgcatgtcagaaagacgcactagctggagttaagactagactgtttgcaattaaaccaaaaactattgacatatttggaacgagattcatccatcatttattttcagtcagttatcatcacgtgaaaatgtcagctttgaggcaaaacttgcctgaacacctgccaataggaactttgagattagctaaaaagggccttaaactgtatgaatacctggaaaaactccaagatgacataatctatagactaaagaaaaatgttatcaccaaggaggatattgaatcactatatgaagatcatgtagatagtgatgcacctgaggaaagtgggaacacggaaaataaacgtccgaacccaacttcaacaaggattgacatagacgagaagaagtacaaggagtttataaggaaagtaatagaaatcgagaaccgttttaataaaagacccggtgacaagacttgtaacgacaacatgaggaaacagcaacaggaggaacttttgaaaaataccgcggcaaagattttaaacgttactacagacagactgagcgaggccatagatgcttactattctaaggaggtcagtcccagggataagataccaaagtatttaaagtctagattcaattctactggaaggcctggtagagctataaggtactatgcagaccttgaaccctatgatatttatgaaagactggagtcgatagagtatttcagggatatgatataccgtagaactttgaggaaactggcaatggaagcattggacgacagacttgcaaggatacttttcatggcacaaaatagccttttctgtgaggtacacccaaactacgaagaagtaattgcagaccttaaaatcccaaagaagactgcagacttcatagcatttgcagccactctaatgtgcaaacagtacgaagtttggaggattaagttaaacttgccaccatatgttaacgagtttagagtaaatccaggagttcttaaggttgcaaacttggatccaaacgacctaccatatcacatttcaactgcaatgtacaacattgttaaaactaatttagacccagcactaatgaatgacccttcggttcaaatacccggaggacccgcgaagaataaaagagaccgtttcaacaggatgaggctcattaagcccaacttgtcagatatgaatgaatccttcatgaactataaggcaaactataaagagtatgaacggattttacttaaaagtccaatttactatctacaattttctgggaaaatcacataatttaatgtttacacactgtacatactaatagtatatagttgtcaggctggtataaatttattgagtttgttaaaattgtctagagtaattttagttgacgtgtttatcaagctttgtatacagtgtagctcaaaacatgacccgttcgccttgacagatatgcattttccgtttttatccactgctattgacatagtcccatcagaacataactcctcctccctagtcataccccaaaggtgattcttacacaccttcccaacagaagttatcagaggtaatctttcaacaaggtgtgatataatcttatttttcctaaaacagacatataagttgtaacgaactctagggatagcttcagttgtaggtttgatcgttgatatgactcgagttcatccctaaacataagctcgacatcaggaacatcagaacacatgagagaagataaaactccaatgcttaaagcgtcaattacacacccacctctcttaacaacctatatgtgtaatttgtatgtagtaaaatagttacagttgagtgtattcttagattccagcacagttgtcctggcaatatgcacagtgatttgaggtcaagaaaacggtgttgaaactgtaaatcgtacaatatgttacatagaatctcgtaattcttatgcgataaatcagagttctcaaaaatgttagtaccagtgattgtcaaatcaataatgccctcgtcaggagctgaatcttcaggtgaaacaattgaaaactgaatgaaaatgtgtaattatcttaggtaattggatacatttactgtcgtttgaactatgttgtcaccaaaagtgacttgagagctgccatgtgcgattgaagaaatattaggtataatatttagtgagtattgctcgtcaagttttcttccatcaagccttaaattggaagaaattgccgatttcacaaaatccataacaacaaacaaaattgacaaaagaatcaattaattgattcatttatacaaataaacacatatcttataacaataaaatacatggaaggaaatttatagtcataattcttgtatttcgtaaccacacataataacaacatattataagaattttcttttacacacaatgcatttgtccaatattaatattgtgtaatattaattattttagattctctttttattcctctatattcgttaatattattgtctgttatgtcattttgtttaaatgatatcacttcaatttgctctctactctaatttataattatttttctctagatttgtttataatttaaaattaattcgaataatctggtttgattttagtttgtactcaagtatgtcgtctgccgatacagattggcatactaatatatattctaatttttatggaacacaaactgactatggaaaaatattcagtaaactccgcagaccagcagttgatttcggtaagttatgtgtgtcttaatcttttttagaatccttgactgatattggtattccttaaccgtaaaatatttctgtagtattcttcttaactgatgcggattatagctttaaagttgtaaagtgtacagctgatgggacaataaaagaggacggagatcacctgacagaagtccccatggtcaggttatacggagttactaaggaacaacaaagtgtattagtttgtgttgatgattttaacccttacttctacattgagaaaccaccagacttgttagatgagtactttgatgatttgaaaagagtattcaatgtaagttaaattcactcataaatatgtgcagaaatacctgagtgagcagaatcaattcaagaaatcactacgctatgtgttggatatacaaaaagtgcgacttacagtaagttggattggtttactaattcacatagtctctgatgatgtatgatgagaatggagagaaggatttccttagaattgtggtgtcttcacccaggatggtatctaacctgaggtcatttattgagtctggagttgacctttcagttgaaggtgactcggtttcaattccattgttcagacagacatatgaagctaatctgccctatgtacttcgatttctgttagataacaatgtcatttgcggctcttggctgatgataccacataatacatacactctaaatgaccctaaaaacttctcagccctgcttagtaattgtaatattgaagttaactgcggtcacagcgatatcataaatttaccactccataacgaatatgaaacaataggcccaattaagatattatcatttgatatcgagtgtattaaactcaacggaacaggtaaataatattgataatataatttggttaggatttcctaatgctaataatgatcctgtaatacaaataagcagtgtgatacacactcacggtaatgaccttaactgtactaagaatttcgttttcacactaaaggaatgtgatagtctggcaaactgcacaatcctgtcatttgacaatgaggaacaactgttgttggcgtggaacgactttgtcacctttgttgatcccgacttcctcacaggatataacataattttatttgatcttccatatcttctgacacgcagtagtgttcttaacattgaagcaaggtttaagaaattgactcgcatcaggagtgtaaactgtaatttcaaagactcaatatcaaacaataacattttgggactttacgagaataaggaaattaacatcgaagggagaattctgtttgatgtctacgatttagtgcggagagactacaaacttaagtcatactcacttaactttgtctcatttgaatttctcaaacaacagaaggaagatgtacattattcaacaatattaaagctcttcaacggcatgaaatattaagattatttattattatagggaataataatgacagaagaagaattgcaagttattgcttaaaggattcaatattacccctactcctcatcaataaactgttgctactgtataattatattgaaatgtccagagtcacaaccacgcccatcaaactcctaattacacggtatgataaactataataaatttgttgtatataactgtgtaaaatatttagggggcagcagataagagtgacgatgcagatatataagcagtgtaagaagatgaactatgtgataccagtgatagctggtggtgggaaaagcagcagtaatgagaatagctatgaaggtgccacagtcttagaaccgctgaaaggataccataagaacccgatttcagtgttagatttccagtctttgtatccctcaatcatgattgcacacaatatttgctactctacactgctaaactacaacaccatcaacaactacaaacctgaagatgtattttgctaatcttgtaatcaatgcttagattgtgacagtgcctgggtacaatgacatttgtttcataaatgttaaaaagcgcaaagtgagtcgttgagaataacaatttttcagggaattttgccaataatagttgagaacctgatcaatgagaggaagaaggccaagaagatgatgaacgagtgtaaggacgagatgttaaagaaggtctacgacggtagacagttggccctcaagataacaaccaactcagtgtatggttacactggagcaactgtaacctaactaaattgtatatgtaatttagagtggagggtttttaccgtgcattgatgtggcaacagcgatcacatcgtttggaagaaacatgattgtaaacaccaaggacgtatgaacactaaaataatttacatttttagctcattgaggagcattttagcaggaaaaacgggttcaaatttgacagtaaggtcatttacggtgatactgactctgtgatgattaactttggaactgacgacatacaagaagctattgatttgggtacctttacaacgctaaaacaaattatataggcaagagtgctgcagatttaataacgagtaaatcagtaagaccaataacgctattgttcgagaaggtgtataagccactgcttttactaagtaaaaaacgttacgccggtataaacctcacaaatcaatattctataggattatactatgttaatagcgaaaattatgagaaaatcgactgcaagggaattgaggtgctttttcacttttaacagcgttttagagtgtgaggagagacttctgtttgctaattcagcagatgctggagaaaatattatatttacttttggtgaagttggaccttgatggtgcaattgagtttgtaaaacagaaggtttcagaactcttaaaaaatgatattgacgtttcactcctcgttattaccaagacactgggtataatcattgcacacataattatgtgtagggaaggtggattatgaacagagattaccacatgttgagttggctaaaaagttgcgaaaacgcggtatgtcattgtttaatacatttaacatctgtttagaccccggcaaggcacccggtgttggtgaccgcataagttatatcattgtcaagggcaccaaaggtatttttacacctttaatatttattatgtttattattacaaatttttaatatttattatacgtttgttattacacttttaatatttattatatgtttattattacacatttttaatatttattaaactttattacagattattacgttctattaatatttctgtgttttataatttttgtcaggtgaaccgttgtttgatagggctgaagagcctttatatgtaactgagaataacttaccaattgatacgaattattacttggactctctaaagaacgttttgctgagaatttttgaagttgtgatgagtaacccaaactcacttttcagtaatttttctaaatcattaatttcactccaggcggagaacacacccgatcaataaacataaacagtaccaccaagggcttaatgaacaaattcctaaccaagattagacgctgcttgtcctgtaacatagttttaaacaatacgacggaatctaccgaggtgttttgctccaattgtaacacgggtagaaagcaacaggtatttatcattgcaccatatctgtttctagattctgcttgataaactaactacctgtcgtcttaaagaggatctctaccataaactttggactcattgtcagaggtatgatataataactgttacggtaactaattaattagatgccaaggaaacttacacaatgcggtgatgtgtgataatagggactgcccaattttctacaggcgagtcaaggttgccaaggacctttcacaactccaaagcacgttaagcacacttcaactacaatatacaaactaacactgtacatcaacagaataatataatgtaatgttgttttatttatatacagttttatactatgtgaattggtttcatgtatacaatatttcatactcaagtatatatacatgaatatattatgtacaatatacaacaatgtatacaaaatgtgtatgtgttgaagagtaatgaaatagattacagatcattaatttgaagtgatgaaatgaacttatccctgctaagttgttggaattttagtaaaaactcttgtcggtatttatgcatgggtatcttgtcaggatcgaaaacgttgaaaccctccagcgcagactcatccacaccctcacgaagcttggttattgtggcgttagtctcgttcaaaacactcaaaagagagctaattgtgtttctaaagtcattaaagacttcaggagaattgacgtatcgcttcaagtggtaacatatacagtttgtatactcggggaagctggggttcagcgataaaatccccaaatggtctattagaatcagccctacgtacttgtacaactccttgtaaatctaaaaaaagtttaaatgtgttttaaatacctgagatgaattcacgctcttaccacttaacctaagcttcatcattatatcctcagatttctctaaagtgcccttggattttacctaacaaattattcaacggtgcatttatcaaggttgttagatttattcaggtaattattattttttataactagtttatcattattaaatataaaaaatctgatttttaatagctagttgtgatattacagtttgtttgaagtttttgatgttgtccaaaacgtgaaacacgagtgacatgatagggatgaacttgtgagttccatccagtaacttgttaagagcaattaggaggtgtaaaacgaacggcatttgtcttttatttgatatttttatctttatggcggagttaattacagtaaccagagggtaaattagtgtcttcattttagtgtctgacctagacagcacatttatccatatatttacagactcgatgaaaccccaagaacaaactgacaatatagtagtattttcctttaagggtttcttggccttgttttcctttgaatcttctttctttttaggtttcttttccttgccagtgttgacccattccctcctgacattgtaagccaggttaccaattgttttaaatgaaaaaacatataaattatcatatggaactttcaagtacagctcactgatacagttctgactaagtttgaatagtccgtaattcttaagtgttattccactcattactgatttaacatggctagagtaacatcttttcagtaaaaagtctaaactactgttagaggctgatttagattcagactctgataacttggtgtaatttacgagatatgacctaaatgagagtttaactcgcattaatttgtggtcctttaggcactttaggtattctgagaggaaactaaaacagtcaactctcgtatgtttttgaggatgaccacacattaaggaggacactatttttacaaattggcgattcaaactcttaaaaacacaaatccacttcaccacatgggtcttactcagtgatattaagcatgatcttgtcaaatcaaagtcgtctaatatgaaagccagctgtaccagagaagttgataaaaacttcctcacaagtggcgctgatgcagttacgtcttccttcttagatgttacctccttagactttagatattcagccatagtgtcaaaagttgatgacacgaatatcttgtaaacatcccaatctttaaccacgtaggctttttttgaagactttgaaggctctgaaaaacgatccgctgtgcccttaagtaatcttttattctcattctttaagtatttaaacttcatcttagccttatcaacatccagttttggactcttagtatctgattttaggctgattttatttgaggcaactgatccaacaactgatgagaatacggataaaagattttttactgaattatgtgtatgactagaagccttatcaagtagtttttgtgataatttggaggtcaaaactggtaagtttgtatcctcatcaaaatcaggctctgaatcatcagattccaaatcaacgttattagtttcaccgtcttcatctgagctatactgcgaatgttcggaatctgagtcttcatccacaaattctacctcagaatcatcagaatcaacctcagattcagattctacaaaatctacctgattctcatcctcaaatttatttttatttatctttttcctacttttcttcatgttttcaatgacaaattaagttgaatatgttacaaaattaattatttatgataaattgcaacacataaggtgtagtgtaataggttgttaaattattttattaaattaaaaattatcaaaattttattgtaagtcaaggttattcaactcctagtatcatttttgatatgtttttacaggattctgtttcttcctcttttgtagctacacagttatgccaatcgatggctgcgattccaggcttcatattagtttcactaacatatttattcaagcttttaattttttcaagatctctatgggataaaaccgatagtgcgatttctcttccaaagtgagttggtattttacggtagtttggcctgtcaaatacccagagacattttgcaaatgatacctcaccagaatcatctgacttgccaactgcttgcagatataaatattgtgttttattgtttactcttgatgtaattccgtgaaatccaacatcttcagactcaaatggtattcttgtagcatcagaaaatatctgtgacttatccacaaaattgaaacattgaagtgctctatgtgaaggaacttccaatacttgtacttgtgtatgcattgctactttcatcgtcaatggcacaaacctttcaaatgctattgctccatttccttttgataatgcaatgtcaaataatctgtctataaccttcttaatatccatttgtacatccagcggagctgatcccagattcgggtaatgatatataggcacaaccaaactatgcatatccgataaagatcccttagccacagcgacataacactaaaacaatttataacacactaatagatcgtgtaataaagtgaataaatgtgtaacacactaatagatcgtgtaataaagtgaataaatgtgtaacacactaatagatcgtgtaataaagtgaataaatgtatatttaactaataaaatatataaatctggtataaatagttttacatgttttgaaacgtatgaaatcatgtgtgtttcacattcgtcattagctaggcaaaaccagcaagaatcctgacaagttgatgattctgttaattttctcttttgttcagttctttctgatggaattgcaccttcccatcttgttatttttaacttacatcctccacattctagtttaccatcagcttttaaagccttttccacttcagattcactcttatattgtacccaactgaagtatttatcaattatagctattaatattaagagttgttagataattattaaggttacgctgttgctggatcgctaatcatctctccgaagattagtttacacatttccacctttccgaaatggcccattacacttttaagtgaagattcatcgatttggccaggtatattcgtaattttaacaacgaatcctgtgaataaattattcatagttaaaattaccatttttgtgagattccttctcagaacctccttcctcactcatttatatataaaataaatttattttattattaatataatatacaaaatataaattattattattttcgggccctactttacggcagtgtgtaacatgagattctactttacaacgctatgataatatgtttgacacgtatgagctgaatagttcacaaatgctaagatcttcttcgtacatgaacccttcctctattaatttttcaaattcttcctcctctggccttggtatcctcagtcgaatctaaatttacttgtgtaaacaataaattaccttcttaactgtgtattgaaaaaggcttgaaaagttgctgtaattgttcatcagcattagagatactttgcaaagtgatatatacttggaaatcctctcttgatcatccaaataatcctctggagctctcggtgacgtctgtacaaagaacagaattaccaactcctaaatacaaattatcattaaataatccctaccattactaaaatgactggtgaggtacccaaatgatttactgctgtacgttcagttactctaacaaggcatgaaccacaggccagtgtcgccacacacaaaagatcaaattcatcatcagaaatcacatgtttatctactaatgtgtttataaacatgtttatatcatgattttcttggaaaatcccctttataaacggttcttcactcttttgacatagattacaaagaaggttcagaagtgactctgataacaacttataactatcggatttgtccaaattcactgatattggaggcaaaaactccacaggattactcggacaaaactttccaccttcaagaacatagtctggaatctgaatttctggagcaactttacacatttgtccatcatattcactcagtaaattatggtttattttcttgaggaaaagctcgtagtccaccaacgggtccagatgtatcctcgtaacaacctcacataacattttaatcgcgtttctgcatgttccacttttttcgtcaaaatttactactccaaaaaacaacttaatcaatacattggccaggccgtccacagtgtaaatgtctgatgcgtcaatgtagttaaatgatggtaacagccaaatgaagtcaaattcacttatacattcgattatcttactcaatttcgacaagtactacaaatttttataagtaacttattatacgtgatagaataatattttagttacctgatgtttaaaatgcattggttctagtgtcatccagcatcctagcaaacgtacgctataatgtttacatctgctgattgaacttgaatttggaaatttacaactctcaatttgatcaaaaaaatcaaaaagaagctgtattgttctatgaaacagtgagaagaattcctcctaaaaggcattaatttatccattcttaccattttttcaaagggttctatgaactctgaaattgatgtcataactccttctaatgcttcaaatggacttgagtttactaaactgctctcaatccttaacacttcgtccaatgtcaagtgtatctcaacttcacacctctttgctagctttagaaacccgacacatgtttcattacttaaactaattactctgttttgaatagaagttgttaagaaattcagcaaataagccatattatccctagtaatacgagtgtctaatatatctaaacacctcttactcaccatcaaatttatctcgaaacggttttgactaccaccaccaacatcacttttacaattcaactcatttaagtaatgaatcaagagcttcaagaggtcaaaattatttgatttgatgcatttttcaaccagtaagatcttaccattatgaggaactaacctgactaacaactgaatgcaggataaactcattaaaactccttccgacttttctcttaaatcttccaatagtgagtccaaaagtgaataaagaaccttgaaaagcttagttttagttaaatctatagacttttcaataggcgtttcagaatcttggaaatccaattcctgtaagtgtgcttctgctaatgaattcaaatccttataaagttccattagtagagaatgttcctctttaaactccttttttgacaataagtcacacaacacacaatctaactcttgagatccttccttcatttgtacagaatactcttttttatcatcagtgttagtgagtgatatgtcaaacatgtcatttatcaggtactctagggattcttccatctcatttacatctactgtatctgaatattcaaacacaaactcagaattcaaatgttctgacaactttaatagacatgacagtgactcgtaaataagtctgatccaaactgtttcagactctccaatcttgtcagatattgccttggttgaagaatcaaacttaaactcctttctgcacaaattctcaccaaggatatttgatatatatgcaacaatattcctcatgtgttttgctgaatctctggtacacagtaacatatttgacagttccagtccaatgattttaaaaattgtcgaggaccttaggagtaaatatataaactctggatccaaggctgtgataatctgcttacatacttcctaaaaaataaaattaatcatattcattacctcagattcaattttccccttaaagttgaacagtttggttgataagatgaacttgtgtttatagtctagtgaagggtgtaaacgatatattaggtgcgataaacggtcacaaacgtgacctgaactacaattattgtacattattttaaaattttagatagtaatttagataaaatcgactggtcctttatatacccatcaacaactgatgttcctgcgataaagcctttgttttccttcctttcgtatcttggttttaagtccggtcctgtgtccacaaccgtgcttggagagtctccagatatatctctcgctctgaaaccgaagtttgtaagcggttcctcagctaaaagtccgttatcaattctacattttagataaacggaggccagttttgtacagtttgaagaatttccgttatgaactcttatacaatcaaggtaatttttactatcctccttacaaacaccttcgtgatccaggggaaatgatccacggtctggtggaataggctttactcttttagtaactccaactgtcataaaacatatttaaatttaacaaagatatatcaaagaatcaatgatttacatatagaataacaatgagcgggagaaaaaggtgttataaaatatataaatttatagaaaatagtatttaaataatatatatttatgttttgatgataaatgttaaggaatttatgttttttgatataataaggaatttgaaagccctatataacgtcaacataaaaaatactaccatattattcttttagtatattttttttattttcaaattacaataataaattaaatttaatgtgtaataatagccttgtaagatataatgtatattatccattgtttgaaagtttttacactttcaatttttttatccttcctggcgtataataaccgttttgcttattctgtgaataaaactaaaataccagataaaaccttcggttagttttagctatattgcttaaaaatttttagagggagtagtttttcgtattaagaaagggctgaactatttcactgactgtagcgtagatatgctgttaaagcactgtgataaggatacttctgtaaactttgagtgttttagatgtttgggagaatgtatttcaattgcagctagggccgctctgatggacaaggagcacggggagaaattcgacgacgagctatgattttatacactcatgaccaagtactcagttatcaaatattgttctctatatgagtctgactcaagagtgacgttctgtgaaccttcaggaagaactgttgtcattgagaagaataatttgggggtgtcagtttttgattactctaccaatgacaccgagtcaaagttccagttcaactgttacggcattttgggctccttaaccttcatgaaccttaagtacctgatagttgttactaaggctacaaagtgcggaaggttatttttggaccacgatgtttacacaattaactcaaagaagctgattccgctcttttacccagtaaacctgagctcgagggaacgtgagtttcttagacttttcaacgattttgacatttccagcaacttctacttcagttacacctacaacctcgcaaacacacttcagctgaatcttagctataaatccttgtcatcagataaaacaacgttaatcccgggtgaaaacgactggatggcttttgacccagtgcttgtggaccagaaatattgctacaattttaaccacaaaatggatctttgcagtgtggatgaacgctgttttggcctatctctccacgttattcatggatatttctcagagtctgtccttaaccttagtggtcgcaatataacatacaccctaatatcaaggagatcaagattttactcaggaactaggtacagaaaacgtggaattacaggaagcggtcaagtggcaaatgatgttgaaactgaacaaatactccatgactggtcaatgtctcgttcaatatcatcttttgtactcgttagggggtcaattccaatattctggtcccaagaccctagtgaatcgttcctaaagaagccaccaatcatatactcccaaaacgatcctacaaattccagtgttcgaagtcattttatggaacttttgagctcgtacggaggccctcttgtggttctggatcttttatcagataacccatcaactgaggagggccagttatcagagcgttacagacgcataattgaggaattgaatactgaactgcccagttttcttaagattatgtactactcaaagaacattaaatctttgcttgaaaagggtgtggctaagcagatggtaaaggacgttgtcgacacagtcatgaatactctaaagttgacttacttacccgcattcaactcaaacaccataagttgtactaacgttgtaaatccacagaatcactcaactgacatgataatacaaaagggcgtgattagaattagttgcctggactgtttggataggacaagtgcattttctaaacacttatcgctcagaatgctaaagtaccaacttgaacttattgggatcagagtcaactatgaactgtcaacttacttcaccaattactctccaatacaaaacagttccttcaccgaaaactgccatcaaaattctcaaaaccttaatcaaagtagttatcaaaattatcagaatatttaccagagtaggggcagtttatcaaattcaagtgcttcattttcctcaaatagtttatcttcaagaagtagcgcaagttttgaacacagggttagcagagaacgaatgaactcggtgggtgacgttctagtcgtggataaagatgaggggataatagtcagtgactactttggattcaataatgttaagggattgatgtttgaggttgttaaggaccgctacgaggagatgtgtgacgttttatcaatgcagtatgctggaagtaaggctctgaggaagtatgaaggccacatcagtgcaatcaacatctccagagaactgtttacaaacgttaggagaaggtataggaattactttgaggacactaggattcaggaactaaccaacgcatttctgtgtgcggatcctctttcatattactcgcaagtttgccccaacattgaacagtatgatctggacgacattatccactttaagcccataaatatgcagtttaacatcgtagactcttttgtgctggcgtttatagtcttcaataaacggatttccaagttttcccaacttcagcaggaaagtccggttgaagttcctgatgtgcttgacgaggatcttaactacctaatatacactaggtttttcgatttgatttccaaacacacttttgaaatcactagggaatttgactccatcgatgataacactgattatgtttgtgattattcacctgatggcactttaatgtcggaaagaactaatgtgctgaagaaggttatgttcaattatctcactttggagtatcagttacaggaagggtacactttcctttccaagtataaacccactagtaaaatcattgaccttgataactcctcagcgctagattacagctcagacatgctagtcaggccttttatttcaccaattattcaagagtaccaagatcaacaacaggctgatcaggacgaacaggctcaagatttaaatttgcaggacaactcttctgatttcatcaactttttgtctcctttagccgtttacgaccccagtcagtggtccttgaccctgaaatccaacatcaactctctaaacagtttcatcaatgtatcaatttaatataatcaatattttcaatcaaatactagacttttccattatcttaaaaattactctatataaagtttattatattatttttaaagaaattttaagtggattaaattctattgaactcaatacaaattgttagagcgtaagcgttaaaattatttagagtagtgtttaaaaatcctagtgtatttttgtgcgtgaattagtccagagatgattcgatttgggctaaaaaagataaaattaaggttaacttactcgagtccgtcatctccaactgatgagaggaacttctcaagtttattctcaatttctgcaaatttcattaaattaaaattattatacacgattagtatacacagtagtagtagatactctactagtatattatatgtaaaatattatactagtacctcgagatttctggtggaaattatcaccttcaaagttaaacttgaagatatcaaaattctcatcaacaaaagataataagcaggaggctttgattattgaaattgcaacgagttcgttgggcgtgtagtttatgcacatttgagtcttgtaaatgtcaattacaagtagccttacaacctcctggagctttttagcgtacgattgaagttcagtgaactcatttgaaaccgagactaggaaaagcctgacataaggtcctactaactagaaaatattaaaaaataaacaaactgaatctggtagtggaattggtccgataaagtagtcaagtgagtgtagtagttgattctcacgatcaagaatttgcgattttaaattctttatctcctaagcaattttataacctagtttacactaagttattcagtagtttatatatatttataatatagttaaaatataatctagattgctttaaaaaactaacttctccatcatcctgtaacatccaggaagaaacggaaggggttgaggtgaatttagagttttggctaacgatgattttgtatacagtggtgctgatgtcgtacagcttcctggtggattttaagagtccgatttcatcctctttgtacttccaagccagaagcacacaggcggaagcagttagaaactgctcatcagattttgaaactactctccggttcaaaccatttttttcatgattaaatttggtagaggttatccaggacttactagagttcctataaagttgtaaataaaccaaagctgttaaaagcgtcggaagagataaattaagcttttggcagagcagcagaactgtatcggcagttctaagcacaaacttctcttcaaaataatcaacatcaattttataatttgcaggaccacaagatagtttaaacactgacattatatcacgcttcaacttttctttggttgatagttcagatttcaaattttctttagttaataattcagatttgacattttctttggttgatagttcagatttaaccgtttcttcgtgcgataattcagatttaaccgtttgttgagttgataactcagttttaagattatctttacttgatacttcacttttcaaatcacattttgactcaaaacttgttgaatctgactctgatttaacaggtgtaaaatcttgtaattttttatcttcgtttttagcagaatcttcagtgaaaagtgaagaaggttcggtgttaattgaggctgtgtcatcatgtgactctaaatcaaccttgagccttttacgaccccttttattgaaattattgggaaaagaagccattggtttctcattattctttttgttacgaggcattaaatattttacaaataattaatgtacaataaatacagaaaaaatataatgtatgttttggggggaatacatttaacaaatcactttaaatattcatcattatgccagctacaagaagcaatgagccaataattccatacattttaaaacctgacttcacaatcattgtttcagtggttccatccgctttgttacaaacacatgatactgaaaatgggtttgtatacgcccctgtgacaatgtgatatacatgaggatgctcatcaaactcattaatcttgtttgtgacagtggacgtattgaataacgttaaaaagtccctatcctccccgtcggctttaacatgataagggcaatccacagggtctgatggtccatcgcaaccgtacatgaaggtatctcctctcggatcaagtgttatggtgcacggttctccctccctctttatttggctgaacggcgttgctccataagcctcgttttcgtagaagttacaccctgttcttatccgtacatttggattattaatgggtaattcaggaccatcaccaccggtatcaccatcagcaccgccatcagcatcatcatcagctgcaaggcagaactcattgattattacaataaacccaataatggcactgtacaatacctttattgacttcatcttcactcttctttggattataagttatcccctaattcagttatttaaacttaagttagactatattccttgattataacttttgtgccaattttttcctagttttttaaacaactttttagtgtttttacaattctattaattaaaagtgattcttattatcaacattttaccttttcaatgtgtcacttttacacatctgtacacttcaaaccgctcatttaatagagctaaaatgacaccgatgtgtaaacttaccatttgtccatttacattgaaattattctaatactattactaactgtagttttatacctaaaataacattattcccataatgtaccataatatacaaattttaaaacattgaaacttatcttaattacaaaagtattgcaattaaacagaatcctagctgaaagtattattgagtcgttttaagatcctgcttttaacttttcaacttcctccatatattttacagcagctttttgagccaatgacttgattagtggtaatgagtgaccgtataagccacttccagagtcgattgtaatcagtgaaatttcccctaaacatgattaaataacagatatacaaattaccagtttcagggtcacacagaatagtaagggctgtggaacaataagtgacaatctcatagtctgtaggatccaaaatcactaaatcttcggccgttaaagagtctgaagatggtctaacaatgccaactgaaactgaatatggcacactaatcatctcaattccagacaggtaaaggcacaagatgagcgtgtttatgcacactgacaagagtcctccagaatcctccattatttgtacccgaagcgatagtgttaccttgcctaacttgtcaacttttaccaacctttgcattatcttcagtaatgtacattccatacttctaatagaagacttaattgtacctatcaaaccattataataatgagtagaatttcatgaatatctgagaaatgtgataaataaagaggaaggaagaaatacctgaggaaggccgaacgaaaacctccatgtgaggcttatggaagttccctggagcattttttgactttgtttcagaggaaaacattaaaatcgagatcactgaggtcctgcctccgatcccagtcagattccctttctcatctctgacgttacctacacttattttacaggaaggtccacttttcagtggatttaacttaaaggaaaagggcctaagtgaataatttgacctttcatcaattctcttgaaatttatcataatatttactgcagaatcaagtataaaatatatcatggggaatgtgtaaatcatatcactaaattcagtagtaaattgatggataaattgttttaaaaggttagtcaacctcgatttgatctacaacgaggtgttttttaatgtgttcaatatgttctctgaggtattcggtggttcccggtgttagcttattatcaggagctgcgtaggttcgagaacatactttcttaaacgttctcgagtgttttgaaccgtttttatccagcacaactacgtctacgtttccgcccgatcctaaatcgttggtaattcctgcacttattgcctttaccgccagttccaccgcctcctcaacactcattccatcaaaataatctgcaagattaattataaatttattataatactatagtaatacattatatttaataatagcatagcattgtaaatgtgtagttggttactttgttcgagaactgtcatggcatttagggatccagagcccatggtacagaatggaagtgagtctgaagatccatggggagaaacagagaagaggtgaggtccagtgtaatcgaaacctccaagaattagagcacattgtttgtatccttgatacttaaagagttcatgtaccagcattgatatacacatctgggccctgggttgtttcttagtatttagtctatgaagttcaatgttatttgcaagccatagagttgtgtgttcaaggtcagccgcaactcctgcgcctgcgcagtatatgttatccgatatcttatgaagctttgaacagttcttatctgcaactattataccctgagtggctctggtatcggctgccaaaaccactgaatcctttcccatcactccgcaaatcgttgttccagttttcagataattatgacctgtacaaatatatttgatgagtattatatgcataatttaatattatatgaataatctaatattatatgaataatagtataaaaagtaccgttgatagagttttgaattcttgaatttctggaatagttggaaaagtcccatccacccttttgggacatataagtcttcaaataatcatagttcatgattataataaaattattaatattattaatattatgaaatggttagttggtaatacacagtggggaattaatctttaaaaaaattaaaaataaaataaaatatattctacattattattccgatgttggaatacagacctgagaactttactagtgaagaatttagattaactgggagtcttttttgcagttgcggagtcccgttcaccaacaggcatagaaatgtagattaaaaaattaaataaattaacatgattgtaggtaccatgttatcacgtcttttgtcaaaactgtataaataatgtggaatctcaaaataagtgtaaaatgttagttttactagaaataataatcctattaggtgtgattccatagtagaaaaagtagaggaattacacccaaacgaggatatatttgtttgcacagttcaaaggtgtaaccaggcatttcttaattttccaagcctcaaggctcacgctaaattatcgcactcggtctcagtcgacaccgttgatgatttttatgaaaagtttggagatgttgaatattcaataccaaaaacacaattgttaactaaggacaaacatggatttaagacggtttccactcagaatctggaatcttcacaatcacccatgaagtttgggaatcaggattccagtaccggaaagtcagaaaagtcaccgaaaaagaatactaagtcaaatttgaaggaagacgatttcgaatcattaatgtaacataattttaactaatttcagtgtgttttttaattttttaattttaaattaacatacaccttgtaatatatattttacacatcaggtaacgcgtgtctatttcaaagtgtttttaatcttctgtaattattctttttagaatgtgctgtataaattttaattgttgttgagttacacattagtcccaatactcgcgataaattatgacttcttctacagtataaaatggaaaggacactataaataatttttaataatttatggattcttcttttaacagttttcaatacgcatcgaatagtttcaaacgtcctaatataccttcagagaataatgatatttctgaggaatatttggagaataagcctaaacgcactttcggtttcttctcagcctcaaagcttgatactaataatccacaaaacgatgattcatcttttttaaaaacatataaacctgacgaaaatcttttaaacagtcactggctattttcagatgaatcgcctcttaatcaagtttcaaacactaattcaattacacatttaaataataacacactgaacagttttaatcagacttctatcgcaacaacaagggccacttcaattgaaacaccaacggggtttaagctagcgtccggtaaacagtgtaattactttaaccccgagaagactgaggagtttaggaagcttttaggtcttgatgacgttgatgtaacagttgattctctaaagcctgcagtgcctcgatttacaaacgccaacaatatgactccggagtcgaaccaaaatttcaatgtaaacccaaatttgaagcctgaacagacatttaggcaaaacactagcgtttacgaagattcaaactcagattccaactccaatgcggaaacgatttcagaccttccatcgcaggattcaggaaagctttcatacaccgatgtttggaacctccactgcacatttacacactactatagctctaatatgtcattagaggtcatttctaaactgtggcgtaagtatggaaacccatttcttgtaaactatagtaatgctgaacagtacagttacctcttgttcactcatcaaaatgaccatgtaaccgttggagggtttaatgaaatcgtgtcctgcttcaagaaaattgtatcaaagtctaatattaacttgtaagttaacagaaattttgataatattttaccctttagacgccgacatgtttatgacgattcttggctcagggataaatttaagttactcacactcatttcgtgtaaaagatataccaaaaaggtaatctatcactattacacatattacatcattaacaagagtatattaatgattagatatataaactgtgtaagacgagagatttgatgtattcggtgatgaatgttccacttccaaatcccataaatttgataaggaaactcataagacttgttaaaacaggaaactcacataacgattccatactcacaaggatttttaaccgtatcaaccgttgttactatatttttatagtattatagtagtgtggtattattatattgatgagtgatgtaggtgattcgacacccgatattccagtggtagtgagagtggagtcatatgacggcattgatgtttatttgtttgacggggctgaggtgtacaggggagtgttatcggataaccacattaagtcggcctttgaatccaagaaggtccggccaggctcaaagttactcctccagggcgtaattttcaatgaaattaaagatgaatttgtgcttttacttaactttaactccatttcaatagcttctaaacgctcactaggaattcaacccaaacataccaacgtcatcatcaaaggtattcaaatatcttacacttacgcatacacaaggattagtgtaatatgttttagatttggtggttggaggaggaagagtatcaagagttgaggttgtggtattgaaatacctgccgttggtatataagatttggtacaaatgtcctgaaacttgcgagaaaaagtgtcttacactttctgaaaatgaatacattcaaattacgcagaacccggaatctaaaattctaggtaatctcccataatactacacaatgcaaattacgtttaggaacaattgagagtatatcaacagtttacacaatgtacgtcgtggatgccttggtacttaatgaaaacgctccccttaatcaacataaattcctccttaaatcatttctcaccattactctaaacaacgtatgttaattctcatataaatgggcgtcattaacctatatcacctatattaaccaaaatatacttgcattagtattatattgttattataggttgatgattcgatatcgtatgtattgaggcctttgacgagatttgtattgactaatacgatgataacctatcacactaatattgactttttctatgataaccagcttgactttgagccagtaaagctttcaagcacacctcatagtaagctcgatgtgttggaaagtaatgtgaagtttccagagaatttggttgacagatgtgagatattcaggagtattttgaaaaagtgcccatcactctcagtgccagaggatataagcgaggacgaatattttgagaggataaaaaataaaagtgagaaaccaaggttatttctgggccaaatttgcgatttgaacggagtagtattacacgtggaggagcttgaggagtcaccaaagtactgttacttcagagtatacatgagtactacaatgttaaatatcgtgtgtgtaaagattagctataaaaacgtaaatgaccaaaagagcaaattctcaatcacacctgatattaagactttacataagagacttaatgaagctcatgtcgcagtcgcttcaagtggatctggcccagattcacccacaaaggggacatatccgtcaattttttataccttatcaaatttacaatatgtaggactggatgagcagtattcgatatacaattttcagatgaattctgaccaggtaattatttcctaggatagcagctgaaatggaatttttagatatctttgaaggagtgttttgttttaaaaaaacttcaagaatgtttaattaatagcggaatgatatgtttaaaatcaggttcataaaaattaaaataatattctgtatgttagggttccagattttgctgtccggatatcagtcgttaggagacacacatgtggaaaacgcttgtaaaatatttgtaaaaggaacattatttaacattgtcgaggtttacagacttgtacaacttgaatgtgtgtatgttcaagagtttcttgacataatcaagtgctagcagcgtgaatctaccgcttccccatatatactatatattttttatttttcgctcaatagttaattataaatgaaatgttttatttcactttgcttctggtagtttcttccactgtttttgcaatagacagagacaccaagttagaggctaacccatacgctaaggttcatatcagaaacaaagcgcatttgttggagcggctctcgcagatttttaacgccgcaaccagtgaggacatcgccgggttctcaaaggatctgctcaggcgcaagttcggaaagggtgaactgctggattattcctaccggaatctcgaaagatctgattttgtaggaatactcccgaggtgtgtatgcaattatttgacctgtaatttacccatttgtgccgctctttgctttaacaacgacatcaaaagcgagaaattattcgactgcctctcttgcttcggagagtgtattcccatgttcttacgctgtattactggtgatcaacattaactagtagtattccgttaaaattagtattgattcaattttaagattacattttggtatcaaattaacattactcatagttatatacttgtataatatattaaagaatattctaaataatggtgtataattaagagtatatagctactagtataatagtataaaatagtagtatagatattgcaattgtatatagaatatatagaaatgatgaagatttgggtgaatttaatagtattgggattgttgagatttgttgttccagtatgttctaatggttatagtgaagtgaaaacaacgcttcacggtatgttcaaggataaggattttggagaatccctggaccttctaattagcaagtacaaatatacaccggagttaattgagaaatcgttcaaaagatgtctggagaagaaagtggaggataacaagcttatggcctgttttatctcaggtctttacagagaaaaggtgctggaagaacacaaactacttctttgtatagctgaatacgccaaggacgcagtggtgacgtgtattatatcatgccttaacaactacacacccgagtgctttaaggtaattctttgctcttgcattatttttagtgtttcggaaacaatttggaaaggataaagacgtgcatggacgatgctccctacacttatatgtaaattatttaaaagggttataaacacccaaacttatctaatctttcacatagctattgttaatcttgtgaacttattgcatgattatcttaattctcaccaagctaattgtgaatactttcattacaaagttatcaactgataaaattattaatatacattaggtttgacataggtatgataaacattaatgtttgttgtggtagatatagtgacgtaaattaacaatagtgtaaaataggagaagtgatatagtaaataacgagtgggactggtaatccatgtgattaaaaggtaataatacactaagaaagttgaatatggatccggtggacttgacgtaatggttcaagatggacaacatacggaatgaacacaggaaacgaactcagattgggataagaatagttagaagaaacacttgaaggaacattaaatgggtctttagctccaatttcagaggggttcatgttgtagtcctactgaaataaattttctgatacatgtgcatactgattagataagtaataggattttaatatatatttaatttataatttaaatttcacattttaatattataaaattaatttatatataatgaaaaatatgttcatgggaattggagaaaatgtgttaggcggtagtgtgttatacgttgccctgataatttgcataatttgttgagtaaaattttgattttaaaaaataacctataaaacatatgtaaattagtataaaccatatgtaaattattataaaccattttaaattattataaatcacttgtaaattattataatgtatggaatccggttaatttgggggataattctcctattttggagtattatacccgtattaagtgcccctggatcccctaaaagaggaataatgagcaaaaaccaaataatgaagatgttagatgagtctgttaggagaataattgatccacccatggaagaagaatctgataagaaagcattaacgaagtacatttttctaacaaaatcgctctcagtatgcatgagtagaggtaaaattaccaaaggtgaactggtttcttgtatcaactcaagttttactgaccttgaaattgtgcctccgccacaactaattcactgcgtgggcgattatctcatttgtaccggtaaaactttcattaaaaggatgaaaaaaggcccagaagatgaacactttttatccgtatttttcattacacatttgttacacagttaaatgccatttttacatatatattatgaaaattatatagataaaattatgtattgatgataatttcttagtgtatgggagaatgtttgccgaatctggtattatgtatagtaagatcggagcctcagcctgaaagatatgaagaattctaattagaagaaggttaaatctagtagtgtgtacaatatcgagtttgtctagtgaaattataaaatctgtaaatttttgtaatttgaattaaataccattttcttacatttttaaaatataaattatatttaattttgtatataattgtggattcgtgcttttcttgtgttgagaagattgccctacacagtaattaatttctattttaatttacttcgataattacaactgatatcgcacacagaaactatgctcgcgtctaaagtgttatacttggccttccttctatctactgtcttaataggctccacgccgtttgacgactaccaaagtcaaacggcggcgattcttgagcttctaggcaggaaggaagccaatcgctcacttataaaagttgtttcagactgcatgggaaagacttttaatattaacggaaaatctcaggatttcctccgttgtgtaaatgactcactccacaccgatgatctcacaaatgctgatgatattaggttcattttaggaaattacgtcgtcagatcatcaattctactttacaaatgctacgctaaaaaaagtgacataatctactgtttaaaggttgctcatcatatctctactattactccaccttttagccttcgttatcagttatatagttaattattatcattgtaattgtaaatgtgtaaataggtgtttggagattgtttgccattactaatgaggaatttgttcgggtttagtgactatactcgaaggtgcagaaggctgattcatatgcctaactacgacaaggatgacggctacttaaaggatgaggacgacgattatgacaaggaatatgatccatacgacgattacgatgatgactacgatgacgattttgatgacgaagatctgggcgattatgactatgacgttgatgaagaagatgaaggcgcattcagcgattttctaagtgaaagagctaaagacactggttctcccactattagtgtcaaatctgatagtggctcaagagatgctgatagtctggataatagtgcactggataacgttgcacttggtaatattttactgagtcttgaccctaattttacacacagtaatgttgacattgatgcttcacaaactcttattgacgccaatgttacacaggatattgatgaccctaatcgtgcacatactagtattgaccctaactttacacacagtaatgttggcattgatgattcacaaactgttaatgaccccactggtacacagggtgttaacgaccccactggtacacagggtgttaacgaccctaatcgtacatatactgttaatcccggtgttacacatggtcctggtgcccctaatcttacatatactattgtggatcagagtgctacacaggacaataccgtccctgatcctattttgccggataacagttctggtgattctattgaagtactaggacctgatgaccaacattatcagtagtcttatgtcattccattattgtcaattcacacattaatctccaataatagcaacacacttaaaacaatgtaaacagacttaatagttggttaatttgtaatataaactaaatatacttattaggtattttttgtgccattaaatcaccttcagagtatacccctatagggtctccaatacaaaactcggcagaattacttattatcacattcctattaatatgagtaaatttgtaacttacttgtcaaattctgtgtttggagtcctaggttttaaaaactttaaagtaaaaaagtcacaacttaacctcttgcactcccctaatcaaatattatcactagaattaatgttaaagtataaagatataaaaaataacgtaaaaaggtgtgtaaaaaatactgatggcatcggaataggaggaaacagtctcaagagtgccgataatttgcgatggtttacaaatgcctggaaaagatgagactaaagagacgaacctttgcgattcaagttaatgttatataaagatgataaagctcctgaaactaagaaattacttgaagaaacgaacttctgttggccttaactgaaacctaaagaattttaataattaattgtctaacccttccatttaataggggatagagatccgttaaatttgaagagtaacatagtttagataagccaaaagactcgttatacacatcaaactcatctaccctaacactgacacagtcagtttcctcaacacatctgaacatagtgtaaataatagttaattatttgagaatttacttcatcagagcttcttggtagggataagaatcaggagattctcgatcacagtgaaatgacctgaaattgagattaacccatttataaaagttaaacttacaaatcatttaaatgtagaaagttgttattaatacagtaatcatagagtgaataaaccagttttatttcatttacaaatatataataatagataaaaaatgaattgatataaaccaaattcatatggatagaattactgaaatcattaatcaaaattaaaaataagaaaatgtgtagattaatttgtgagattgaacgacatcaactataaatgtgtatcaaaatgtgaatggggaatatattccattaaattatgtgatttcaaataaattttttataaattaatcaataatttgtttaaaaaattatttattttaaatgcagaaatttgtaatctagagttttaatgtcatctgagcttgatttcaataatctcgactcgattttcacgtttaaatcaaaaaaatataacaaaccagctgaaaagaacaagtttggtcaaagaatttgctttctcttgaaatccgcacagttattctccacaacaaaccctaatctaagccgtttttacatcaaagaactcgttgaaatttgcgaaaaacacttgataaggttaaatcctaaggttaagaggaaattctgcaaaggttgttacacatatttcgtccaaggtttaaatttacatactaagaaccctgctgattctgttattaacgttgatactaatacatctaaaagtgttaagagtaatttatcattttcaacatgcctaatatgtactagaactagagctcaccctcctcaaacttgataatcttttcttttaaaattgatcagaatgttctttaaaactaatattttacccattagctatgcatttttacattcatttaatgcacatgtactaccaagtatatatagaaatttgtcatacatgtatccaaatgaatgcgtttttgtatatctattatttttacatacatgtttacttattagcaatccattttgataaatagcacacaatttaatatatttatttgaacaatgctccttttaatttttagcttaatttcattagtttaccacgaattttacttaaaaaggggaatttttatttaaaaatggggtttttaagtaagaacgataatagttcagttaaaagtgacgggccaataaagattgataaactctttcccgatgaaaataataagaacaaagatgataaaagaaacctgtcccgtgcatcgtcaggtaaaattaagaatggaaggaataagaggaaacggcgtcgtataaaggggtccaacaaaactataaggcgtgatgtgactgttttaattgaagaattgaaaggagaaatccaccctaaaagtgaacttgaatcattagattcattggatacactttctgaccttgacgcatctcagtcatttgaattgagcagaaatgattttgatcattctctgagcctgaatactaagaaggaactagatgagatatatgaggctattgatgagttaaacaaactgtgcattgaacctattaaagttaagctcaaaaaggattacgttaagattaagaaatcaaataaggatcctgagaatagtgttaatgataaagttgaggttgctgaggatctcagatatagcgctgatattaacatagttttatcaagcaggaaaaggggcgaaactgatgctgatgctgatgttgatactgaggaaaatacttctaatgacttttcactcattgttgaacctgctagtgatgaatcaatatccggagataactcaggctcagcactcattgctcccagcaataacttaaatttacagatttcccatttcagctctgactctgtaaggacactagataactcagataataccgattcaaacaataagaaaggtaatattactggtgaagatgacccaagtaatcctgacacaaccggccgctctggtgacaatttagaaaagaatagccctttttattcaaggactcttttttacaggttccatgaaccttccttttactatgattattattataacagttttgttccgaatcattctaatcttgagtataccaagtgtcccagccccagtagtctgggctttgattccgtaaactccctcaataattcccttaatgctcctagtgagattatcattaaacctccagtttccattggaaaatcaattagtttccgcagtaatgtgtgcaagtctgttttagctaaggacaggttcatttctgatactgttttccaaattaactggttcaaccttagccgcaggagaaaatccaagtcttttctcccctgctgcattgcttaatttaattaattttattatacatttttattccactagtataattttatgatattttacacattatttaatgtgtttattcatctattatctactttatgtattatactcgtatattgtgtgtagtacatataccgtgtatatttactatagtattaagtataaaaaatgtgtaaaactgtaacggtatatatcacacatttaattgtttttaaactagcaaaatggtaaattgggagtctaatatcaaggtttgtgctttactagtcaaacgagggtgtacagaacaaggtattctcaaaactgtaatactcatagaactacacagctgcatgcacaatgagtaacaaatataaagtaatatatactatgtggtagaatattatttgggaattaatcgtttaagacacaggatccagggtttgttttggttatcccagattttggaaatgatgttggtaaggatgaggttggcgttgtaataatcgtcttgtgagactgctctacacagtgtggccaggagcgaattcgcctcagcactaagtgaaccttgtttcaacatgcctactaaatcatttacgctctgtttactttctaaatccatcttggaatctccgagtttcgctgtcaatgaatttaacgttgagaccaccaaatctaaatcagcctttggcatcatttctcccttgggcacattctgcgttgacgctattattaacttgttcgactcctgcgtcgcaactgtttttgaggacagctgctgtgtcgctgttggatttggccagggtactggcattcctggtttcactgcacctgcaactgcgcctggtgcactacttcccatgctgaagctctgtccactgccccccctactataacttggtgcggctgttccaactgagtaattctgtgcacttggtcccatactgtaactctgcggtctacttgtcagtggatgtactgggttactaacatttgagttataacctggcctacttgtttgactcatgtttgccacaccactaccaactttcgcagtcaagctagtattcaaatttgtgttcaaacttgtgttcaaatgacttggaacggcattcaaattagcatgtgcaggattcaaattagtatgagtaggattcaaattagtgtgtgtagtatttaagttggtagaatgtggtagactgttgtatgaggataagttagtgcttgaggtgttgcttgggtactgtgaacttagaaatcctgttgacactgaacttacagctgttgagcctgacactgaatttgccgttgcataactctgtgccactcctggaactgctgttgatcctggataattagtggcttgtgctgggtaatgtgaagtaggttgaagagctgttagaggcacagtccttgttgtagtatttgtcattgattgacttaggtttgctactggtgctgttgttagtccacttccaactccgtgtacagaagattgagttgtataaggtgttggttggccaacagaatgtactgcatttggtaccgttgacgttgctggatgttgtaacccaggttgtactacaggttgcgttccgtaaggagtttgctgaaccccaggttgtaccagcggctgagctccgtaagcttgttgtactacggattgaacaggttgaacgggttgttgtacggaatattgaggtgagtgtttagttgcaagttgattttcaattttcgatttcatttgtcgaagttgttcagaatttgaggcccccgtgacattaagggtttccaaggccttatccaacatgccagcatcaatgaatacttcagacagttccatcaaaacggagtcaaaactatcattttggtatccagcagttgtattactccacattgaaaatgacaacactgataatttcagcatcatctcaactctttcctccaatctaccgccgtccaaaccagccttagtgctacttaaactctgttgtaatttccatagattagccacttggaaataatcacatgctaatatatatgcaattgtagcctcctgatagaaaccttgttcgaagagacgtttagcaaacttgtgtgagagtgttctgaacagtgtcaagtccccaccgtaggtataaaggatgcaaagtgtttccttccagtctttcaaattactgtgtaaaagcactgtttcaacatcaccttgcattaacaggtgcaacaggttaagaaatgggtcctttttagactccactaccttttccactaattctaaaaacacctcctggcctcctacgtacgccaacagtaaaccttcaaccactttattcaagtccaagcatctctttgccgcttctttaaaatctgcattcactaacttattcttcaatttcttatccgagcaccaatctaaaccacccaatcccatattcacgctggttacattagattccgtgttcaaatccaataaattgttgggattcatcaaaccggagttaggatttaataggcctgcgttagggtccagtaagttagaattgggatctaataaattattattgagggttagagaattgaagaaatcttccgcatctttatcatcttgtgatgcgacttcacttaaactattcgttctattagtgaaatacgatcctctgttacttagggattggtttcccagatttccacccagttgtgttggtagatttaaactatttgtaacatttgaattgacagactctgttggcaataaattagtagcgggctcaaaattcgagtaacccaacgttgacaacaaatctttcagttgtcctttatactgacattttagaactgaccaggtaagtttttcatattcacttgtgcttgaatttgctttcgattcacaaaactccgtaaacatattctcgtcacttaacatacccatcacttccagcacactatccagcattttaacgctatcactatcaagctgtgatgtgagagtaaagttattaagctcgacattattccatgaagtaacttgacctgcaaatccagaagtgattccacctcttttcctggtccaaactggtaaatatgatccttcaactgttcctgaatacaagtcatggacgttaagttgcccatcattcgcttgggataggaacagccctggtgaatttggatgccactccactcttgaatgatgtgatagcgcttctgtctggaacgtcgacagtagtgtaaatgtgcgttctggagtcaaatgccaacacttggtggtatcatcttttgaacttgtaagcaacacgcttgggtcatgtggtgagaatttcaaatcagtcaatcctcttgtatgggccttaacatcaccatgtccccttgcatctgtgtgtgatttaacatcactgtgtgcattgagttcaaagagtggagctgaagtatttctgagatcccacaactgtactgacggtgcgttatcatcaccgtaggcgactactaaatacgttgcttgatccggcacccagtccagtgctactggatttacacgtccaatgggatctctaaatacgcttgctggtctgtttacgttaagatcccagacaacaacgttgctagtatcagcaggattaagcgcagatcctgctgatgccagtatgtgtggcaaacggtggttccaactcaaactcgttacctgtcccactttccacttaccgtagctcacatctgtagctgcataattagatgggtctgacaagtctagtgaatacacttgtccataaagtccagctactcctagcttattctttccgccgtatgccaaacacttaattggtgaggaacaaacattagtagtataagtttgtaatagagttttactttcagttagggctgctgaatcatagaaaaaaacatccccagaacttgatccaactactattaaacccttatcgtcagtatacggcgctcctaaacatccatcaacacaatatacaatactatatacttaataatataattggtagtataatactatatagttaacagtatagtgaatagaatgtgactaacctagtttaatccacttcatggttgtaaggtgagtgtttaaatccactggcatggagtgtagaagtgagaactcagctattccggccgtgctcctggacgacacgtaatcatcaaaattactcccaccaaagctagtattagtaaatgagaacggcgtttctggagcgaattggttaaaattagtgttttcgaagctatttgtaaaaaaatcagaattagagtccgacttttcggtgactttgaagtcaagtaggttaagcgatagcggctgcgtgtcctctcttggcgtagtattacacgaggactcgtgcaggcctgaggccgccagaacgtagcgcgaggttgcgctgcagggcgagaaaactccaaagcctttcatgcctttcaccgataaatcagacgaaaaacctcatgggtaatttaaattaaatcttgacagcttatttgatcaactaattgcgaaaatcgtaaattgattataataatggaatccacccatctacaatgtgggtacaacagatacattttttatcttttcagttaaaactcattttttacccatttctgactttataaataatattactatattttatactcaataattctccattattttactaaaatttacaatcaatatcacacattttaatactatagtttctaatagtataatttctaatagtataattatcaatagtataattagcaacagtatatatagtactggatatgtgaaaaggatgttaaatttataattttttaatataatcaacaatatcattgctgagtccctttaaatcgccaaaaacaagactggagtagtctggtgataacctcgaagttgtttcctttatatacttcacacccatttttatagtatctgaccattcttttatacaatagcatttattgtaataacaatattaactaagtatttactaactacataatcagcatgtgtaataataaagctagtttaaccttttttgggatgttcagcgtcggtatttatcagagatctgtctttgattaattgaaacctaaatgagtgcgggattagaaagttttcgaccttttctggatgtagagtcgtgctatcttcgaagggacaatagtacgtttcattcaacacatttaagaaccagctgatgacaaataggcaatcttttaaactatgagcattactgttgtttaaacgtccggaaccagattcgcttatcttaatgaaaggatagacaacttgaggaaaagtggacatgattgtgcagacgagtactatataaccgactctaacaaagtcatttctggcatatctaaacgcgtttatcagggtcaaaaccctctcatttatccaagattcaaaatcctgcacattccttgccataaagtatgggtttaaaatcttagtacttagtactatcttattaaccaatggtaaaagccttttaatcgtagccaaagactcctttttaattttcaaaggttgaaaatttgtccatttctgatcaattcccaatgctgcaactttatcagaagataaatccgccactacacatgactctaaaaacttgaagaacatatccaaaattccatagtatcgttctgtcatttgttcactaagaccgaaagtactcaaaactgctaacatcaaatccattagcagtgaaccaactgggtgattgacatcaattggattcagatgtgacagattatataatttgttaagactaaatgtggtataacgattactaaaaatacgttcttcacccatcacagtgtaatcctaaacccaatatataatgagcgcgaaattaatgagtaaaaataccttgttgaaatgtagtatagtattaagaaatgaaacatattctgttaatatttgtattgagaatttattgaaaagagtatcttcaaataaactttcaacgttggaaatataatctagaaacggaccaaaaaggctaaatatttgtccaaaccacttttctggttcactagtaggttttggcaaaattctcagaatgcttagccatactgcgagaaacaactcatctatcaaactataccttgtaatacttactatttttagccctaaacacatattactttatgtaaaataccttgttcccctacaactaccgtgttataaacaatgccgctaacaaatttggtaaagttatagttaagatcatcaaagtcttcatcccagtccttccaatctaaatcggctgtaaactctaaaattgcacttaaaatagcttcacaaatttctgctgattgaagtttacagtagagatctaaaacggaatcaaaattagctctacattcgtcatactccaaacataatttacaagccaactccagacttctagtccgaattacaggcaccgtagtctaaacatagtctaaagataatatttcttaccgtggctattagtaataagtcctttatcagctgattgatcggttgggttttaggcaattcacgccaaatattctcgtcctcgctatttttatacaggttactaagtggtaccaggctttgaactttcagttgtgggtcctgtgacgaaacacactttatcagaaatgacaatattttcgccttagtttcgtgtgttattagtggcttcttacaccagaggttaagtatcctactaattctaaacaccagcaacttgctgactttggataaaactcggttactccgttcagtatctaataaatttacaatgttgctgaaagattctaaaagcgctacaaaatgcttatagcaatgaaagttataaaagtccttgaaacacagagtgtaaatctggagaaaagtgtcatactccaagaaattattcatatcaaggaaattgtttaaactgaagttaactatcgagttaaatgtaaaattaaacaggtcaactaatttaatattcatacaagaaattaagtcaggaactaagttcagggctggagctgttgtaggaacctcttcatcattccaacattcaatagtgttttcatcaagtcttaaatatttagtccttaggaggtcaagaaactttaggaatccacctctagaaccaagtattttgtaaaaataaaatgttaactggcgttccattaagacttcaagttggctttcctttaattctgggtttagacttacaagttcttcaaagtttttatagtatggcacattgttaatatcaaccttgtgatgggttttaggagagcttattggtgacacacttgactgaactgctgggatcggctccacattatcaaaataaattttagaataattgtcattattcactgaactcgagctgaaaattgttgtcattaatttgattgactcagtttcaaactcttgcaatccggctccagagtgtactagaaagtcaaaaacttggtccaataaaagtgaaaaatctaaaaacacaaaatcgtaaggcaccttttcaaataaaagtgcaaaccctttcaacattcttagtacattttttacaactactgttaaacgctctgaaccagcagtagcatttgaatgctgtaaaactttcgacaggatggtaaatttttgtaaaaaatttgacaacaattggagcaattcttgatttttgtacacagttctaaagcagtaggaatagaaattaagtataatacagtccagatacaggttaaatttaagttgaatcgggtcaaattcagtgtggagtagatctgggtttaattccaatttcttccacttctgaaaaaattgaattgaccaaattttagataaatatgggtaaaactgttcggccatttgatttgttacatttctatccttaaaaatgcgcatagaaatgcgttccttaaacacatggtggagcagaaatatcaaattataagccttaatatcaattgagttttcaattgattttagtcttaaaatgaagaaatagtaaaattctgggcaatttaatgggaattcatttctaaacacagatctaattaaaaggcagaactccttaggcataatgacattattggcctcatacaccaattcaatagtttgctgaagcttaagtttaatgtctgagaaaagctgacggtaatctacattagtgttaggatcgtttgttttcaaacgagataatagtttacaaactgaattttttaaaataataaacgagagctttgaaaaatcatcgttacgggttgttgagatatgtaaaagagttgagaggaaagaagcattggattcaagctcaataatcctcaatgaggcttcatttcttacagcttctatattagatacggatcctttgagtaagttaatgacatattccgattcttctgacatttaatctataaaatcaaataattaacttcatcttgataaaatctttctataatacaaacaataaaaaatccaaacatcttataatgtaatatttaaatctgtggtgaatggtatacggtatgagttatattatataactacacagtttgtttaaaaaatcttaaaatatgattaatcggctaagaataactaaatttggttttaaaaattattctaacaattataatcacgtttcgttgataaaaagaatcaacttttctacattatcgccttctaagattattcaggatgcacatcgggcctgttttaaggatattaagcagtcaataaaagaagattcattttctccctatgcaaatgatttaaaaaattgcatattctctaaacaggtactcttaacattttttaaacccctataggaagccgcttctgcgcttaaactatgtttagatttaaatttttttgagccaaagctctttagagatgttataaaagttttagaagatgagtattttaagcctgttttattagaagactcaaatgatacacacaatgaactgtacaacattaccaagactaatccctcaaacacatttagtttcataaattcattacctccaaaggataaatcaactattataatagtaagtcgctatacctattaatattattaactgattaattaataattagtggacttggaaaactaattcaaatgttaaaaaagttaaacagagattgacagttaaaagaactgaagaaattgatcctgaaaagaaagaattatatgtaacaaagaggactggaatggttttagaccctataccaataagggcaagaatgtcttatattccgcctggaaaaaaactttcaaatatgctttcaatgcagctgagggagcatgttccaaacgctgatttgattgacttatgttatatttcacatatattttcaacacctttaccactttcaggacagttaaacgaggatactattgatcttatagcggaacatttctgtaaatttgatacctcagacctttccaggaacatgtttacactttcctctttctgtagatattctaaaaataggtttttggaggtttcgtctttcatggatccgaatgtaaatagaagaccaactagaggaaaactattacagaaaattgattataggaaattatccaccaactttatgacgaaaatgttagaatcagttgaaaattatagtaattccagtgatttaaatgatgactacagtggatatttggtggttaattcagagattacagttcatttacacattttaaataatttggccaactctgacattccgatatcgataaataaatgggaaaaattagtaataaaggtaaaaaatttgatggaatcagttaaaaattttgatgttaaggagatttccctttactgcgacgcagttttaagcataaaatatacaacaccaaataccatagacgtggcaaaacagatgatcaaaaacttcacagtctcctgtgaatatactaaggaagattattacctaatttcacaaatattaaagtttatccttaacaatcaatttaccactgagtcaagtgaattaataaagtgtgtttgtacattaactttgaataacatggaaagattagaaccatcacaaaggttagaaagaggtgttcattaatgttatttagagttcctttgctgaagtatctttacacattttcaagtcttcttaacgataatgaaagggaagagctaaggtaagtttagcattaaatttagggtttaggaatcaaatttctgaacttacttctgaagggttccgcttttaacacttcaattcttaattgtgtgaatttttctagattttaaaatattcccaattacaccatacctgtatacacattcagagaatacattattgtatattatgagataagaatatgtatgtaatttagtactgtttaaaatgttattttatcatttttttgtattatattttgtaacaatagcagaaggtgatgatctctcaaacgacatcacaataacgagatcttccaagctaaaactgggagaaatcctagagaaaaatattaaaacacctttagaaataaataataagtttagagacgggtttaaaattagtgatctagagtcttttatcgcagaatctagtaatgatcaagattccagtgtgtggtacaaagtatataacagggaggaaggaagtgaaaatgaggaaagtaacgaaccttccgaagaaaatagagaagtagatgatcaaaaagttccacttttaacaccaaatgatccaaatggaaaagagccatcaagttacaactttgatcgttggtgtaaacaagataaggttctaataacagtatctgaacttacggtaatgcattcggcatttcttctaattgtacttttactaaccatttggtaagtaatattatcgaattattgtgtataggcatttgatttgtgtatcgacaagttataaaaaatacggtaggtggaataataattaaggttttttagagggatattccgattatcctcaatttgatccaaataatagtaactctatagtccaagaaggttatagctttacactaccaggatcactgataattaagcttattttagcatacacattcctgtgtcagctgatggtattatcctttgtatgtaacgagttgtgcattccgatggtttccagcgttgagtactgggacagtagagctaagccgtttctgttctcatggcttgtgggattttttactctgttaattagctttttggtgcggaataccagagtaggaaagcatttatttgtaattagagtaccattggaaacctgtacaatagttaaggttagagactttaacaagtcatcaacagagcatgatatacttaacagcatgttagatttgtttagaaatgcaattattaagataaagctattttttaacattccagactcgatattcagaataccttttgaaaagtataaagttgccaagtactgttacgtcccagtagtggaggctgattctgaacgtttcttctactaccactacgttaaatatacttacgacagtgaggagtcatgtttcctggactcttctaaccggctgaatagttatttgatgagtactaacttggtacatctgatggataatggcggactcacagaatcagaatcagctagaagaagcgaagatattgggcctaacgagatcccaatagagaaacttggtttctggaccctattgtacagagaagtatcagacccagttttcttcatgcagttgtacttaactacgaaatcaatatattggagaagttatattacagcaccaatttggggcattacaaccttgtatacaatttataaaaaggtgaagataatatatgatcagcagaatgatttatataatctaaccacaagtagtaaccaaaagtatgtaacagttctgagggaaaatgtaacgaaaaacgtaatgtcgagggatttggcagtgggagacattgtcagagttgaaaatgactgggaagtaccaagtgacatgatcatgctaagaggagatgcaatagttgatgagagtagtataactggagagtcaattcctctcaaaaagaggaaactagacctcgataaatattcaaactataaccttaacatgaatatttacgattttatacacacaccgacttctgacgccatgaaaagtaaccagaatagtggtaacagtagagataaactagtctataagagagatttatccaataatttaccaagtccatcgaatattaatgagaatttgttaaaatctggaacaaaagtcatatcagtgcttggaaaccaggaaacctcagtttcagcagtagcagtagtaatagcaacaggagtgtacacaactaagggaaagcaaattaaaggtgttttattcccaaaccagttcaggttaaagtatgacacacaattaccacttgttttcctcctaacattcatttacgcacttttttgctcatactaccaggtaaccacaaatttattactccgtcttttagataaggttcttgggttggaatatgatatcgatattttacagcataggaaccatgtcacaggtatttaacattaaaattaatacggaattattcatccataataatttctcatttgatcacaggtggtaccagtttggacaagtacaataatatcaataagtcagagcagggcatgccaaagactgtcaaaatctgagagtatctactgcattgcaccttcaagaatcgcagtttgcgggaaactcagagtcatgtgctttgataaaactggaacactaaccaacaataaactcattttcaacggtatcccatactatcacactactataccatacacactatagtattattgtattggtgtaggatcgaaatactttaatgaggagagtttgatgttattgagcccggagaagatattggagcacttgagtagtaattttgagggggatttattcaaaatattgaataccaaggagtatgtgatatcgctggcggtggccacatgccactcagtgtggccctcagacacctccgaacagtttggaaatcacgtagacaaatcgtaagtccacacaattacacatgttacaagtgtttatacatcatttctatacgtgtgataatgttttagaatgtttgattgtactggctgtgtggtggaccagttcatagataaaactggaaaaaacagaagattcatcaagagcgctgagaatgagaaattaggtaatttttagtccaactgatgagatttagtcattgaagttataaactcgttcgatttcgattatcaaaagaaattatcatcagtcgttgtctcaatcgaaggtataaacacattaacacattatatacaatattatatacaattttatataacaatatagtagatataaatgatatatatcatttgtttgattagttgagggagaaacgagacgtatagtatttgtgaagggcgcatttgagaatttatcagtgtgttgcaacaacgagtcggagaatttatcaatactatcaaacaatgagtcatcaaatgggtcatatgttctcggtttggcatataagcttttggatgaaaactcggattacacagatagaaacctcatggagtcaaatttgcaaatggtgtcactgctcatattcaataatcaagtaagaccagagagtaaggaggtgattcaaacgttaaatgaggccatggtgaggaccgtaatactcacgggagataacattccagcgtcacaatacgttgcaagaaagtgtaatatgatccagaggaatcaggattcaacttctttagttgattcagattctaaccagagtaaccagagtgaagttgacgaactaaatgaaagagtgtgtccagttgcgataatgaataataacaagatagagtggaagtatccattcggagaagaggatgaggagaagttatttttttccgaggagtacagtgacatttcaatgactggggatgtttttgacttcatcgaaaataactggaacgagatactctcaaagtaccgcaggttctccacaaatgaaagcgttaaccaaaccaagttcgaacactttctaatgaaaattagaatattcgcaagattaaaccccaatgtaatttgacactagctatcaattacctctttacctaattataacattgtttagcaaaaggtgagagtaatcaactcatttaagagacttggaattatcactggaatgtgcggagatggcaccaacgactgcttagcattacaagcctcacacgccggcatcagtctaacaaaagtattacacattccgtactcatatttagtacagttatataattgtgtgtagggcgttagttctatggtatcaccgttttcatcaatgactaataagctggagtcagtaatatacttattaaggtattttatacacagtttagactcatatatactaactaagttgtagtattatctaaattatgatagtaaaatggtaattgtagagagggtcgtggtagtttggtgacgtgccttgcatgttttaagtttatgttactgtttgggcttatgattgcatttgtcaaggtgactttgttcagactttgcagaggagtaatgccagaatggggatacctcttcatcgaaaacgctatcatgctgttactaagttacacaatggcactctcaaggtattcaattattcttttacattttaacagtttattacaccacactaatttacgagtaataccaatttgtttcataggccaagtgaaaaattgaggataagatcacccacaagtagtcttttaggaccactcacactattatcggtgggaataatgttcatcatcaacattgcgttcctgctcctactctttgaactgtaccacagactcggtatcattttcacattcacattttatattcacaatttatttcatatttacaacttatttcatatgtgtaaataattgtttgtaaataattgttgtaggaatacctacgagtcttaggtataacatgtcgaagcctcctgcagcctggtggatactgtaagttttagagttagactaaatcattttagatctgacaattttgaggctccaactgtgtgtttctggctctgttaccaagtggttaacacagcgctggtcttctcatttggcggtgttttcagagaatcaattcaccgaaacaccggattttcaacgtacctacacactaattacactaattgataaatactcatgtgttggttagggtttggttgtttataaattcgtttctgacgtatttaacgctgtcaaagccgaacaagttgacgtgtctgttcagaattaactgcacagatgagatgtccagagcaaccaagataccaattctagaactcctaaccactagcgcaagcggactaccattccacggagaacattcacacaacgttctacccaaaaactttaaagtttgttcatactactttatttatccaatttactaattgagtcatttatgtatattaactatttgtatacacatttagcaacttattaactaacattcctatgttaatattccagtgttaaatattcctgtgttaaatatttctgtgttaatattcctgtgttgaaaagtgtttagattgcatttttgggattaaactttgttaactgtgtgatcaactgtttgatagcgaagtcgtttttctcaaactcgttcctgaagagagtgagggcgttcattgggtacaagtgtagcgccgaccggatcaaaatttaaaaatttcaatgttatattatatcatcattgtaatatatggattacttagtgtatattcatttatagtagctgattctagaataaaatatggaaatatacctgtttacacacgattagcatcaaatgagaatgctcaggcaggaatccaggtattttaaggtcttaacattaatttttagagtttgaatgagggaattttgtcaaatcttgaaaaaacaggtaaatttcaacatggttgcgtttgacacacttaatgcaggaatttcaagtttaaacgagttgcaacaggagtgtattccgaagattcttgatgattccataaagaacgtgtgtattctatcccaaactggtactgggaaaacactatcatacctggtaccaatagtacaaatgattcttaacgtgagtttttgagcataattaagtattaggagccaaaagatgaagagtcaacgtgtgtagtaatagttccaaacggtttactgacttatcaagtttttgcagttctgagtaacttaacaaggtgagaaatatacgactcattgccttagtggacttaatattaaagcgaagactgtggatgatgttgaaaaggggaaactgccagatataatagtttcctctccgttaaaactactcgacaaatttgaagcctactcgctaaactataaatttgatgctttcgaacgagttaagtacctggtgctggatgaagttgacctgttattcaattataaacaggtaatttacacattttcacataaaatacccgcatttaggatatacttgacattcttgacaggaccaacaagaggtttattcatcccaatcaattttactcatcctaatcaactttaatcatgctaatgaattttaatcattataatcaactttaatcatgctaatgaattttaatcattataatcaactttaatcattctaattaatcttaatcattataataaattttattatgctactcaattttaataggtgtaaaacggtactgtcatccagtactttaccaaactttggacccaagagtgctgctaacattatatcctcactgtttaagaactgcacatttgtgcagacaaaagacctacatacaatcccacccaaagttaaacttgaattcatcaattacaaagatgacgacgacaggtgatgatattttactcatacagtattaatttctttaggtttcgtaaagttgttgaatatcttagagagaatagtgaccgcacaattatttactgtaacagctactcaaattgtgaaaaattgtacaataaactgtcaaagctcaggaaaaatgtgcatttcataacccgtgtactgttattagtgaatagttatatctgacttaacttttaggatgttaacctcatggagcagattttgatcctgacgagtttagacaagtaaatcacacatgttacattgaatattaggagaatggttgttttgtcaactgatcatgccagtagaggtgttgactttaagaacattaaaactgtcatacactacgatttcccaaaggatgtagttcgttttatacacaggtatcgtttttattataactttgaatagaactggccgagttggaagacacggaactgaaggcaactgcctcgcattttggtcagaacctgacgagtttctgaaggataacattgaaaataacttagacacgtttgttaatcttttatagcatttcttagactcccgaacttatttagcaggagacgaggcctcagaaagaagtttaaaaaggctctacagctacaactcgctgaatctcaattttctgtttaatcagaaatcttagtgcaccaaattgtaatatataacattgtatacacagtatgagataaaatgataaataattgtgtatggaatgtaataagattattcgttggctacaacttcagtttggagacctgagaagtcatcgactggaatgtgctgaacgagagtgtacattggttccttggcatcctcgtcgtcgttacggcgcctagagaccctaaccctgacccttctcggcaggtttttaataccattcgaccacaaaaactcgttcaatctagtatcaagacggacgtcctacaataaatattataattataattatgtataataatttaattggatgaaaaagtgttaggattgtgaacctttgttttcatggctctggctgcgaaggcttttatcttcttgacggcggttggtgcttttctcttaaaagttacgcgatggaccattttatgcaaatggatagtataatccctcgtcaggggcgccaaagtcttcctcttaagcttctctacgaaaatcattagaattaaattaataaaaaatattattaaaaaaaataaatcaaacaaataatagacataaaatagataaatatttatatatccattgaagaatattaaaatacctcgtgccatatcttcagagtattaattaaaaataattatcagcaaatattataaaataagttaatagttttcatctgatgttgggcacagtaaatcgttaatctttattatcccttcattcttcaccaaatgatatttatcataaatgaaataatttttcagtaaaaatttgaaaattaatcacaattgtatttgatttgctgtggaatccttacaccaaaatgtcatattgaaaacaatttatatactcatacattttattatttttataaaaaactgtattaatttgttattatcacaaatatttattatattccactcttaccattttttacattttaccctttattcaattatcgttatattcacattttaacacttatttacacatgtattttatttttacactatttatgttattttattaaaacaaatcgtctaattgatttatagaaaattttaattttctttactttgccttcctactttaatgatttattttatataatttacaattttatataatttacaattttatataatttataattttatataatttataatttgaaatgtagtctggattatttattttatagattaattttagcaaatttaaaatgaaattaaaataatttaagtttaaatgttggattacacatctccacggaattcaacccatttaccctctgattccgcctacactcaagctgaagctgtaaaatcagaccacggccgtcaccagtcattcacatggcacaacgcagttggcaaaaacaacgaactcgtctcaatctttaaaatctccctaaaaaccaaagattacgaaagtttgttcctcactaatcgttaataatagttaaatttacttttagtttacccttgagaactttacccacttatttatagtattggtaatatattaatttagttgtaacaccgtatgatgttgatttggcgaaacatcatgttaagcacattaaaactgttcggcatccgtttattctcaaggttctagactcctacgagtcagattccgcaatttgtatcattactgagcgatgttacccgtttgacagcaagtgtatttttacatactaatttaacgttctcagatttatcatcagatcccacgcttgggattagccaagtctgttcagccttaaactttttacacaaaaagtgtaacttagtttactcaatggtgaatccatacggaattggcgtcaaagaagatggtcagcattttattattaaattacttcaggctcctggtgcttgtacaactttgaactcgtttctgacattgataaaacactaagtcaacatcaaaatgtcgtcaaaaaccacatctcattcaacgacggatggaaaccaaacatacacaacctcaatctcaactccgttcatttcgataagtaatacttatcttattacccccaattaccccttaattagccttattttagccttaattacctcttaattatccttatttgtccttaattacctctaatttaacccctaattacccctaattttgcccccaattacctcaatttaccccttattttacccctaattacctctaatttaacctattaatatttatatattaatttgtaatgtgtagttggcagcttggagcgtttatatgttgggtttatgcgttgatttcagataatgaggagcgttgtaatattaagagatacggctttgacttcaactccttcaagctcattgttcccaaactccttcacaacttcctaaacgtattccataacacatttaatatttcactaatacaatttgatattaattgattaggaactgtttggcgagtctgaggtggatttggaacgggtactgaagaccgatgcttattttaaggataacataacctttaacaccatcacttttatctcagaattgcacattaagagccaatttgaaattgaagaatttttcacaaaactacccgaaaatattaataaaatccccgtactcattagggtatcccactcacacaacctcttacactataaatattataattatgttataattatgttatggttgataatgttgtagtgtaagcagttattgcctgagatattgaggagtataaacttgtgtaagaactttttgccgatgattctcgactgtgtgattatgatttgtaaatcgatagtgctgcaggactttagaaaacacgtttacccctcgattctggaacttttcaaggacagcgataagtcgataaggttctgtctcctcaagaggatgaatgagctggacgagttacttgacgagacccaagtgtcccaggacatgtttgagtatttttacgtcggtttcacggatccgtctcctcaaatcaggggtgaaactataaaatcactttcataccttataaggaagataaattctaagcagaaggcgagttgtacatattcacttcttaagtgtgtttccgactctgagcctacaatcagagctaattccataatctgcttcgccaagattatacccttcattgagcccgagctggtttccaaagttctacctcaagtttggcgaaatggactccatgacacttttctaaagtcaaaaaccgcgtctctcgaggtaaacattggctgataatattttttagtcaatttccgcgtcacacatttttcttacgcctgaggataaagcgttttatctcattccaatggtttctgagacgctcttggattccgacgttaaggtcaggagactcgcctttgacacaatttcaaagctcttagactccttaaaaccgtttgcagtcccgggtatttatagtgttaacttatttttgcagaaagcatcgagaaatccagcggagaaaagagctggtgacacttactaatttgaaactttaaactcaatttgtgaaatttacaaattatgtaaatgtgaaatgtacaaattatgtaaatacgttaacagatgtgtacagttaaaacattcatgtttagtgctgtttaacaatttagtgatagattgggaaggatcatgctagagcgcctctgacctcgtcatgatcttcgaccaggttcctatagagtctgactcctgataaggcgttttctacagtctgtttggttgttgagtatactgtcctagactgagttttagctcccggcggcgcgaacataaatagtacaaggttttgtcctaaaaaatacttatctattggagtaaactacccttgtcgtaaacaacaaaagcgcagtcatcttttgggagcacggttaacagttcctccacatctccctctccgtcgttttgtacacttacaaagtctccagtcaccttaagtaccatgtatctggttttaactttcttcagcttcatctgattgaactttgcgacggtttcttccgacactttaattccgctctccatgcttaattctgctcaacaaattatacaaagaaattttaacacttttgaaattattgattaattaatctggaaaaattctatagtgtgtatgttttatttttgagtctggaatatcacacatgatgttgggtagaaggattttattactttttccttcaacctacacaaacacctttttcaacctaattttttaatcaaactcatcatttacacctaatcaacttgatccaacctctttccctcattttcaccactccttctcatttccttatactctttattattatcttatttacaatttttattatcacattattatcattaatattttgctattatatttatttattacatttattattatatttattttattcagaatactttattattctactctcgctatttcaccaatctctcttaactctatcaaacgcgctatctattcactatatttgataatagaatctcaatgttattctgttaattaacttgcagacaaatcaaaccaatgcaatagaattgaccataaagttatggacatatataaaacaaagtaaataaatatataaataaaaacttaaaaatataataaaaatttaatatataaaattaatatataaaaattaaatatagatttatataatgtacataataataatgtatataatgttaactgtaggaatgtatataaagtagatagttgaaagaggtataaaatgagggtataaaaatgagggtataaaaatgagggtataaaaatgagggtaaaaagtttgggggtataaaatttgttacaggttgtcaatgagataataatgtccgctcagaatggctcgatgccgtgaaaaagagactttttcgtgtcatcgacgttgtgaacatttccggaccggcagagcgactaactcatcatcacgggcgttgacgtaacctgtcgctggtaatctctgtagtagaatcaactatagaagtgatcctgtacgagcacagtcgactaaagcgcgagacactacaaaactctcctacccacacccagcactcacatcgggtaacaagaaaattccatttctcacaaaattctcactcctcaccaattatcaaccacttataataattacataaatttattaattaaaatattttaattattattaatttattcggtaaatttttgaaaatttgaacctttcactttcactcacatttaccacacctcccagtaaattatctttattcaccagtaaattatctttattcaccagtaaattatctttattctccgtagtattatcattattctccgtagtattatcattattcactagtaaattatctttattcactagtaaataggattaaattcctagtaaatagatgtgattccctggtaaatagatgtgattccctggtaaataggcgtgaatccctggtaaataggcttgaatccctggtaaataggcttgaatccctggtaaataggcgtgaatctcagtttggggtcgataaatatgtgttagtttacaggctctggcttttgctggttggctgcgttcctcattactgtgaagttgtgtaatctggccactgttatctcagtgcaagttatctgacgctttatccagtcaagctcaacatcctatccataacattctcatatcacaactaactatattacaactatctaacactattacaactacttgagaatattacaactacttgagaatattaaattatatgtgtggttataccatttcttgtattagttgttcgattccgttgtgttgatcagtaagtaatttaatagcatcatcaatcggatactccaccatagtattcgcctaaaaatttaataaactattgttaaaatatcttaaattatcttaaattattggtaaaatatcttaaattattgttaaataatggtaaaaagtggtaaaaagtgttgaacatacgccgagccacaggaaggctgattcggtatatgggatcctggcttcagagtataaagtgtcagaaatcttaaagtatgtaataacgtcagacttgtcaccagattcctattttaaccattattaatactataaagtatataacaacattgtttatttggggagataccttctttttcttgagtttttcgagtgtataaatggcgtctttgagttcgggtagcttgtccttgattaatcccatcttggcagtgctgtttttctccatgaaacggtatttgctaagtcacgataaaactggatagaacatacgctaaaagctcttttgcgacttgagttagctccgcagagttacgctcccctacgaacttctccatacagtcctacactcaaattaatcttaaacactttaagtgaaagttacgatgaatttagcctcggggacgtttgacttgctctcgttcgtcgatataaactccaaataactcatttttccagagttaaatacttaaaattattttatacttttagaagatttggtgaattaccctatggtgcccgttgtacttcaaatttatttccacattctaaaataaaatttcaataaatttacacatttaaattattctaaactattttcaccaattttagttttttcaacaattttagctattttcccaatttaatatttatccactaattatatccaatttattaagattcctagcttttaacagctaaaaatttaattttatactttattatacacttttggataacttttatacaaaattaaattattcataaaatattaaattatttataaaatatcaaattatttataaaatattaaatcatcagctgtgaaattatgtatggctgtgtgattagttacgcttttgatttttacactaaattattgagatgaagctttctgagttgtttgagcgttacagggaccagaacctcaagggcaggatgttcgttaaaatgttccgggacgccggattaatcacatcctatgacaacagcctcgacctcatcttcgccaagtataagtccaaagtacctaccacagtagaaataattaacgtagtgttccgggattaactatgagcagttcctcaaatcactagaagaagtttcaaggcttttggacatgaaagttccagagttaaagcaaaggctaagggagtcagagggtccgatttacaggggcactgagcccctggcagtaagattacacgatgacaaacggctctacacaggcgttcacctacacggagggccaaaaatcgggaaacaataattaaaattcaattccttaagtgtgactggatcctttcaagtttactggcgactgaggtgtcaactactttatccccaacgttgaccagaagtccgccaagaatcgacggggtcactttaaactcaaccacaggttcacaggagttacctaacctatgccttagagcttcagttatcctctccttcgcctcagcagtcagtttctccgcagactgaaccagacatttaagctgattatttgcccttaaaaataaagtttcaaagtgttttgcaagtgttaaaaactctgcggacctcttttgctcaaataacatttctaggcagtttagagtctgaggctgtaagggcgagcccagagtaccaaaatcctccctgagaaacttcatcttctgcgaagtcctgaggcccggagttgtcatgaacgtgcgaaagtcctcacacgtcacgagtgagtttgaaatgaactttaagtcactcattacctcactaagattcccggccttttccgtagttaaaaacagagcgttagcgtaggagcccattataccacagccctcaagcagcttaccagcggttattcttttaccatttgttgcaaatccacaaaaattaaacaaatttacactcttaggaatgggaaacacaagtgatttataaacaagattaaaacgtttaatcattttaacatttcatactattaattttatactattaatttaatataattaatttaatgaatttaacttaatattgcgatacaaaatgataaatttggttaaggttggatatgttgttgtgtggcgtttgaaggagaataattaatgagtggctttggtccttaattaaattttctacaacacattttagtgaaatttagtgaaaaaaatgttatttcctaaaattattcgtattttagttatttttgtacattacctccacaaacactatacccttgattccactttaaatagttttttatttgtttatacatgtttatacttagttaaattgtgtttcccccttgtcctttattactcaatttcccgtagaatccaatttttctaatttattttgttattcttccaatttttctaatattttccagtttattttgttaatttgttaattatttgttaattgatttgttgtttgtttgtaatttattcatatgtaacgaggggatttgatttatttgttatattctgcgaatgttttgtcggcgccttcaagaattaataccatgactacaatccagggcaaatgggaatggaaattactctaaaatgaaacacggaggtttgaaaaagaacctgaaccaccacaacgacacaaatcacaccctcaaccactcactcaatcacttacacaattttgacatagtcgattacccgggtacagattgtaaatatgagggaccagattgtgaaggagagaattgtaaatatgagggagagtccaaatcgggtataaaagatggattgaaacagcgtacaaatctggataaacgggataaactgagtgggattgaggccgaactgactttaaataattgcctaaaaggcaacgattcatttgaaaacgcatgtaattcaccgactcgtgatactgcacaggataccctcccaccagaaacccagaaaacctttttaaacagctttgaacacaccttaaaaaacctaaacatagccacaatcccacattgccaacttactactgtggatagtgcaaatagtgtaaataatgaagatactactgtggatagtgtaaataatgaagatactactgtggatagtgtaaataatgaagatactactgtggatagtgtaaataatgaagataaagtagacggggagaaaccgcgtaaaagagggcgaaagccgaagaagaggaactggttctcacataaaccaaaacccaaggacgaacctaaaccctatgacaaacccaatgatgaacctttgggatcaactgacaaacccaaggaagaaactgaatcaactggcaaacccaatgatataactgaatcaattgacaaaccctatgacaaacctttaggatcaactgacaaacccagggatgaacctgaatcaattggcaatgtgttagatgttggggatatgtcaaacacccgtgacactggttataaagaggataaacagttggcagatgtgattaagaagaagagttataagagaaagtcgaggcctttggagcagcttaacttgtttaacaaggtgacgcgtaggtctgagagtatttacgagatgcaacttcgcatggcaattgagatgtcaatgaaggattgtaaatccttccaaattaaggaaaacgaagattacacgccggtggagctggataaactcgaggacaccgagggaaatgatgataaagacagcgaatacgaagagtcaaaatcaaccaaaaagaagaaaaccactaaaaaaaccaaaaacacgacaatcgcaaagaaatcacacaaaaatacaaagaaaccagacagcgtaaagaggtcagacaactcaaaaaggtcagacaccgtaaagaggtctgacagtgtaaagaggtctgacagtgtaaagaggtctgacagtgtaaaaagatccgaaaatataaagaaattagacagtgtgaagaaatgggaagtgtcaacgccgagatcagttgagagtacattgacaagtggttccacgtcgatagaatatttaaatggcgattctgtggattccaggtttgagcactgtgacttgagtgttttccccgactcgcaggacgagtcgtttgacaaatctgttcccgccgaatgctcccacttggcagacgaaagcgtaactcaggcgaagatgacagcgtttgaagagtatctctcaatgtgtgaacgcttctactgcggtaagtcattagatgaaaatatctcacaagttggtttacaagttggtttacaagttgattcacacgctaaaaatcacaccaaaccagaactcaaacgatcctcaagctcacaatcacacaaaaacaaacacaacccacacaactcacacaactcacacagtttacacagttctcacagtttacacaattcacatgggttaaataattcccagggattacacaattcccagggattaaacaatttgcaagggttaaataatacgcaaggattacacaattcccagggattacacaattcccagggattaaacaatttgcaagggttaaataatacgcaaggattacacaattcccagggattacacaattcccagggattaaacaatttgcaagggttaaataatacgcaaggattacacaattcccaaggggatagagaggaggatgaaaggattttgaggtttaattgttcgaggttggatcttatgtatagagtgtcgtttaacatattgaagagtgcgttgaggcagccggaggtgattgacctctggggacctaaggaggttgtcctgttcgagctcgggctcttcaagtacggcaaagagttccatgaaatacaaaaatacatacccggcaagtccgttaaggaaattgtcgacatgtactacctctggaaaaagtcaaaccgatacaaactctggaaagccaatcgatactactaataccacacacccatcaatcccatcaatctcatattatactatgttatattataccatactataccatactatactatgtaatactatgttatataatttgtgtgatggtgtttggtgatttaatgaaagataatatttgataaatattttgtaaaatagtgtggaatctcgattatttgtaataaatttttatggatggacgatcttgagaaatctgagcgagatttaaaggcgaatgtcgtggtccagtgtttgaccaactatagactcattagaaaccactacaattgtctatcaaaggttaaaaacgattcttccaaaacttcaatcaaggaattactcctaaaggacgaaaatctggacttcaatgacctgctgaacaggatttcaaactcaatcacatcactggacattaaatctgaccataaatctccggaaatatcactagactcgacaaattccccaaccaacgaactgttacacctaattaaacgctccaaactcaagattctcaaggacaaactatacacatgtcagtcaaacataaattatttacccaattatatgcaatagtatatatttatccaattatgtcaatatataaattaaccaatgtgaatgtgtaatatgtaaattgtttaggtaatgtgcggaatagtggcggatttgacttttctgagtatgctgatgggtactatgatttagtatacgagatgcctgagagtgcaacaactgaactgtttaaacctactgacagttacgacctgtcagtagaaaactactggaaaaacctgaaaaacatgtcaaaagacgacatcacagtgttaagagatgtaaaggatgaagatttcgccaaacccacagtgaaaacccagtcggaaaacacggttagaaattacaatttgctgaatcttttacctggaaatatctcaagtctggcgcatgaaaactactttgaaccttactacaactttaataacttgaagaagatctcagttaatatcggcactgaacgacaactcagacaggtttacatcaggcccagaaataaagacccagacgtaaaattcggactcctaaccagaggacataacaacgatttgattctgaaacggaacaataatttgtaagtctaaactgtgtaaagatgtgtaggaacgagtttctggtcgtgtttgatgatggtaacatggaagtctacgagtcagaaacactccaaccacaagcctcctcacacaaacacctacaaaagtcatgcgtatgtccatttaattataatatttaatttatatttaagttgtaaaaatgatttaattgtagattagaaagttttttgcgagtgaagttgtccggctaaatctggtgaataaagtgatccttaagctaaaaagacaccaaaatgcaagagcattcacagccaaagacatgaagaaacacgccgaccaaattaacaaagtacaacaccactcaaacaacttttacacaatcttacacaactgttacacaattttacacaacttttacacaattatacttacacaatgttaattatatatgtgtttagatgatatctggtataacgctgggttgtttgtgggatgactggaacttttacggtggcgggatagtgactgagactcagaacgaggagttgtcggggaacccgaagttatacttggactccttggaaaacaacgagcttgttcttttatgcaggagttttatcgactcactggacgtcagtgggcggaacctggacaccttcgaggacattttcgcagtgatttcagaaattgtaaactcgtaccgcacactggtaatgaaaaactttaacgaagactacttaaaaatcatgaaacagtcgttccttgaacttaagaccaagtcggcaccttctgacattgcgctgttaacaccggaccttagtgagctaagtgtctcctcaacttcaagcatggataaggagtcagatgttgaatctgagctgaattcacagagggaacaggtgcttccaacttttaacagatttgccaaaacgccagaggaactcactgatttaaacaagttagtgtcatttctcctggcagacgacactgagtcgttcattcgggaaccttttacagacttgtcaaccattactaagataaaaaacgtgtctaaaactgtcataaactgctcaaaatcaattaataaaaggagcaaaaacccaaacctgaaggacaccgacgtcgtactctccgcacttaagatacttgatcttctaatctttctactccagaaatcctcaaagtcattcaacagcgccaaagatcttcactccttcattacaaacgccaagtatctttcttctagtcatttaagttagataattgtaggtataaaagttacataattgtgtgtataaaagttacataattgtaggtatggtgtagagtatagttttgtatcgagtatgtttacgtatttctatgaaagaagtaacgagtcgtactcggtgaaggtgttggggtcgaggcggctcatgtgttatgtaatttggctttgtgtatatttatcaccaaaatatacatttgacttttcatttctactcaattttgaccttaaaaacgtgtcatattccatacttttcagctcatgcattgacctgacctcaatcactcccgctggcagaaccaacaaaaacctctacaagctaaccacgccgctcttttcaggctctaagaagatgaatctaaccagcctcgtaaccaccaaaaccaaacgcttcaaaacacgctaactacattaatattctttgtactatgtatatacaccactatactattatgtatatacacaccggtatagtactatgtatatacacattagtaaactatgtgtatacacaggtatagtacatacggataacaaaggtattatgaaaatatagctaagtatatataaagtatggtacgatattagtcatggacaatgatggtgtttgtgttgtcttgatatgttacatgttcttcgggtgtgccgacgagtttaaaattgtgagaagaaaagtgatagacgccggggactggaataataatgttaaactcgatggatttgctgcagccaggatcaatggcgtcaattctgttcttcgtaacgccaacgaagctgatgagcgagtcctggtgatgtttaatcagagggtaaactgcgagtgatttcagtgattcagaagaaatgttatgaactgtgacgaataaactgacaatcacaggctcgtcagagaactttaactgcgttttagagactgtgagcctgacaagaactttatattccaaaaactcgacattaccgttgaaaagcccaaacctaactggcgtggcccaaaacacaccaaacctcatgcgatccgatgagttttgcagtgacgcagggtccaagtacttcaatgcgttttccaaggggaaaggaaagttcattgtgtttttaggtgggacaggacataactctgagtaattggtttccacaggctcaccgttaacgttgaacttgagttgagtaatttcctccctggagttattaattgccttaaccaagatcgtgtctttatagttgaaatgagcgttgaaagttggtcctttaagggaacgtagaaacagtttgaagggaattacaaggtctaatccccgtttaggtgagacggaaattgagccgttaatcagagaaatcccgtccatgaccattaaaggctggaaaaacaagtaaactgaaagagctttcttgtgaagattaatagcgtcatcgttaaattgcatgtgaacctcgtacatcttctcagttaaactgacctccttaaccttaaaatttggtaaatttatcacactccaggatgactggattagtttacttagcctgtcagggtcatatttatgctgcactgttgagggactgtctaagatttcactggagctgaacacactttcaaggtcaaacgggtctgtaggtgtggtgatggaaatattcggcgttgagagtttgtatgacactggatacggaggaacactaaacgctccaaacacctttaaccttaactctatagacttgattggcgtttcctgcgtattctggagtgaaatctcaatcaaacttgactcaccgttaaaacagtcaaaaagacaaagattttcattctccagctcctcagatttcatactctctgtggcctcactgtacatttccatgtatttccgcaccaaattgtcataatttgatgtgtccgagtctctctttgggtaaaacaccgtgtttgacaatagtgccaggtcagacactttcctaaaataatacctgaaacagggcatgtccctaaacacattaaaatacaacgatttgtcaacctctctctcattaataaactctctcaaactgatttttttacccacttctccggtcaatcctttcttaccaattgtgtccaacctatcaactgcatctattttaccaactttgtctattttaccaactgtattcatattaccaacagtgttaactttggaaacggtgttaactttgggaacagtgttaattttgccaacggtgtagattggtgaccagaagacgacttcaccgaaaaggttccagcaaagtccggcaattttaaaagagcctgtgttggtagttgtaaaggacaaaatcaggcttttcttttcaaattcgcccagtctaaacccctccttatccctcgataaaatctcacaatccacccattccaaattacataactcagaattgtcagaatgttcatcaggattgtccaaacgttcactattattgtccaaatgttcactattattgtccgaaaccttaatagggttcactttttctttattggaaggatcaatttcctgtactagaattttaaagtcatggcagtctacgggtatgcttagtgggttaagtagctgtaacgacagcttaagtgttgtattaatcatgtagtcggacccctttgatttctcagctgggtataaatttttcctggtgtggtctttgatgttgtaaaactttaagcacttttgccacatagggtcggtgaatgaattatcgagcagtttctcgtacaggtcatccacgtacgtagttgacagcttcacgttagtcccgttaacgccgttacttctcatgtgtattatcggcactctcacgaggaatggcattttattattaacaagtggtagatttccgtgtgtgtagtatatggtcgggtagttcagaaagggggctgaaattggcgtgtttttaagatatttagtcctcattctaaagccttgcaacttcattaacgtttttaaatagtaaatctggttcccagacacttgtctccaactttgtgacccaagtttccaactttctgatggaagttccaagcattgtgacccaagtttccgaccttgtgacgtaagttccgaacattgtgaagaaagttcagtactatcagtttggtgtaaatgtgagaagctgtggtttgtgtagttattttcataactgtagtttgtgtagatattttcaaaagtgtttgaaagtatgtttaagcagttgactagaaagttctcgtcgaatgttgcgagtagactgtaaagatgttcgtgtgttatgtaccagtcttcatactcctctagacatgatagataacagcgtttacttaggttttctagccctgcctggctaaatagtctccctgccatcactagctggaatatcttctttttcggctttgaacagaggtttgagctgagttctatgaaaacagcagatcttgcaaattcacttttggtggacggttgtagaattgcgttgtttgacagtagcttgctgaactcttcgtactcgcccagtaacaccgacaaggtgtttgtaaaaaaagactcccacgggtgttcgtgcttgttatatatcaaacttgccttgtcaaggtgtgatattatacttgaaatttctatatttttgtcagaatcctccccctgcttttcaccagggctttgaggcttaaatttacagttgtacaggtgaattccgtacaataaatgtgacaaggcgtggatctcatggtccaaagtcgactttgacacgctggaaatgaacgagtcatttcccgtcccaagttcgtcacacagtagcataaacaagtttgacaagttcttaagaggttcggattttattatcttaagaggctcagactttgggatcttttgtggctcagactttgggatcttttgtggctcagactttgggatcttttgtggctcagattttagtattttagatgagatttttacgcctttaaaaaaggcgttcaaacttgtgacgttggactccaagtttttatagcaggagtcgatgaatttggaggcaaaatcaaagagctttgagtagtcaaagtcctcaaagctctggagtattaaatactgcacgttaaatttgttaattactacgctgaaattcgttgcgttaccgtgtgagaagtaaattattgtcactgggaagcctgaatagttttccagaacctcctccaactgcctgaaatcgtcgtcattgtccaggaaaatgaacacgccgttccgctcaagagcggtttcaaacctctcattcgccttaattctcaggatttttgccagcgtgaagcaccagtcctgaaaccacctcgaatacttctcattcctgtctcctaatgtgttttccagtgtttttcccacttctcggtcatttttttcgagagaatccaggaggctctggaccaggtcattttcccgcaaagtttccaaagtgttaaactcctcaaatgagaacagagaagatttaggatgtctttttattatgttttgtaccaactctaacggggagcatcctgcacatttgatgattttttcagcggctcttggaaacggccttacaacaatcaaaggaccaacatacaaactaattaaatcatccagtatccgattgtccataacaactttagttcacaatttattctcaattcacagaaaatcaacattcctgacaataaatattaaatattataaattgtgtagaaaaatgtagaaaaatgtagaaattgtgtagaaaatgtgtagaaattgtgaaaaataatattaaaaataatactaaaattataccaaaaatagtgtaaaattagtgtaaaattagtataaaattagtgtaaaattagtgtaaaattagtataaaattagtataaacttagtataaaattagtgtggaaaaattataaatgtgtattagagttcgtcgttggaccagtcgtaatcttcctgtttgcttcggagtttttcgacgtcgagtccgcgggacttgaggtggtcgaacatggcctgctctccctcggcgtcgtcgacgctcccccgcgtcacctcaaacccctcagggtccttacccgcaaatatctcctccaactccaagccaccatccatacccttttcttctggagattttggttctggagattctgtttctgtagactgtgtagattttgtatctgtagaccctgtagatccttctgtagaccctgtagatccttctgtagactgtgtaaatccttgtgtagactgtgtagactccatttctagttgcatctttttgaggtgttcgggtacgggagtttcgactttgtcgacttcgaagtcgtcgagtgtgaggtttttggagaattcgaagtcgcgttcgacaaagtcgccgagtgacctgttcagcttctcgtacaggtaattgacaaccagctgcggctcctccaacacaaacccactcttcaactttgccgcattgtacaacaacttaaacaacctatccaaccgcctcatatacctactcttcctctccaacaactctcttctctcaacatctgtagattgatcatccgtaggttttttatcttcctccctctcactatccttctccccctcggtatccttctccccctcggtatccttctccccctcggtatccttctgctgcctctccttctccaccctctccgtatcatttcgttgatctaatttttgtgtttgagtgtagaggtatagaagtttgaccatgattgggtgatcggggttgagttcgagtactttgctgttgagtttgttgaacatgtcgaagctgtcgtctctgtgtacagcgtaggacttcatgagtttttccatgtgggaggacattgaccactcggaggccacgactgtgcaggggtcttccacgagtctcctagagagcttaactcccgaggtttcgggtaacaagtccttgaggtacagaatgagcggtttgtactttgtttccttacgctcctcctccttctgctcctcgtcggttagcttcaggttcaaatccgccttttgcacgtttttaaacttctttcccctgtgctcctccaactttgtcagacacccctcgtccatagtgtcgtgcaagtacaaaacgtcaaatttccgcttcttgagaccctggaggtgcggcatctgcttcaggtcctcgtaactctcactcgtaacataatatatctcagtctgctcctcgggcattttatcaacgtactcgtcaaacgttagctccttttcactaaacaaagttttgtacctcagcagcctcgcaatcttcttccggttctggtcatcgtcataacaacccaccttcaaactacccttgaaaccgttgtagaatttactgtacctatcaacctccttcagccgcttctccaaccccttccgcctcaattccacgtcagccgaccataaactttttttcccacccttcttatttttctcattatcctccatattctcctctttatcccgttgatttttggatgatagttcgaattccttgaattccttgtcatttctctttttccagtcctttttgtaggtgttccactccttttcctcttttacagattttaccttctccagctcatcttcaacctccttaacatcttcgtaagactttttcatgacgtcgtaaagagtgtcaagaactgttctgaccacttttttcccaatgagtttaacgagtttgctctgctgtagatattccctggacacgttcagcgggaacgagtctgagtctacgacaccgtaaactgagaacagatacctcgggataaaatccctcatctcctgggacaccagcactctccttgagtataactttacgttgtggcctaccgattctgagctaaagtacattgcgggcggagagcttggaatgtataaaagcgccttaaagtccacatcgccttccgctgtgaagtggacgtgcgccagaggctcgtcagtcttaccactaattgtcttgtaaaactcgttgtactcctgctctgtaattgtgttcttgttcctggtccagatctgctgagtctcattcacctttacccatccgagctcctgcttatccttcagtttcttgtaaagctggattgggtactttacaaactggctgtattttttaaccaaattctccaaaacatcagttttaaggtaatctgtagcatcttctctcagctccaaagtgataagagtgccatgatctcccaggctgttatccgtgtcctcgtacagctcatagctatttgccgctgaggatctccaaacgtactgtttatcttcgtagtttttagactggaccagcactgtgtctgccaccagaaacgcagagtaaaatccgacaccaaactgaccaatcaagttcgggtcatttcccactttagagagcgaatccaggaaatttgcagtgccagactttgctattgttcccaaattattcattagctcagactttgtcatgcctactccgttatcccaaattgtcagtaacctcttcttagggtatgaccggattctcacgaataactccacgtccttgtctttatagtttttttgtaacgctgtgatcttgtacttttctaacgcgtcggcgctgtttgaaaccagctcccgcaggaaaatatccttgctggaatacagcgagtttacgataatgtccagaagcctcgtaacttccgcctggtactcgtatttttcagatttcgcagaatctttaaataatttttcactcgttaaaaccgatgaatcctctgacatgtccaggagctcctcctcagaaagcgccgcaggcgcttcatcctcaactttgatttcgtcaaagctcaccgggtcctcaaccacctccaaatcatccgactcgtcgcaaaacgcgaaattatcccccctgctgaggtataaaataaaaataagccttaaaaggaacaaactaatattcatgatctgttattctacgattaaaaaaggaacacgagatcactgtgttatataacagaagactttagatattatacttttacaagtctaaattgtacattaaattataagtaaactcctttaaaattggattccacttgtagtgtcacacaaataaattatttaacttttttatttccactttaaatttgtaattttaattattaataaatataaatagttttaggagggaatttacactagaattcgagcactgatgaatttttacacctgacaatgttctcaatgtcctgagatgtattttgatttgtaatttttaattttttgtcatcaatgaataatgtattgacgctggaattaagtgaaaggttttttaacgaaaagtttatagatttgtgttttgtatttcctgacaattttgggccacaatttgccaaattaacggaagactgtaaagatttaatatttgatactaacacttttaatgttttaaattccgaaaaacgcgtgtactattacacaattttaccaaataatttaactaaattcttaaaatcggtaaaaatttccatataattaatatttaggccgaagaatgtttaaaatttctcgagaaaataaactttatcggcgatcaaacttattttgacaccgtttccaatcagctgaaaacccccaaaatcacttcctcttatgaaaaatttgtttacgaaaacttaaagcttgttaatagtttacttggattttcattttcagtgccagaactcgcaggttcctcagctaaatccaactttgaaccaagatgtaacatcagtgagaattttattcttggcgttgttgagtctggattatctttcttttatgttccgtacgagcattcggctgtgaagtttttgggcttttctacaattggagtcatgaccataatgtccacattttacctctttgtcaacaacttctcaccccttgtcaatgactacaataagtataaagaatttacatttgacgatattgtctctctggctacgggcggagataactcgaaaactgacatactcgtctctgacatttacgactcctattccacagtcattaacctccctccagaactccaagcctcaacctttggtaaactacaaactcctcagttaaacacaatgaactcgggggatacaactaacttgggggatacacgaggatttacgggaattgtgtgttacaactctttaataatgatttaggttaggattgaggatttttgtaaatcgttgattagtttattcgcggaaagcattgctcagcagtgtgttccacgggcaattattcataattccacaacgtaatttatatactattagaattttttaggatattacttgttggtttagtgtttaggaatcggcgtttatgctcgttggttcttgagaagattcgaatgttctcaggagatgttaaggttttattctcggcagttaattcactggcaaccgttttatccgcattaaaatcttaattttcacacattgtgattttaattttctacacattgtgattttcaatttaacattaaatattttttacattaaaatatataaaattaattatttaattttaattatttaatattaattattagtttaaataatttgtataatagtttaaatgtttttaaagaggattctatcatttcagagtggtgtaaatgtccagaaaagattcttaactgagcttttatacgatatatcccgtaagaatctttactgtggctcattttcaagctgtgaagatgtaacaaagtacatcgagtttttggtaactctcaatgcttaaaattaatttttagtccgttggaaactgtaatgaagctgataaaatctcagattctacacttttattcaacgaacacgtgcataaaatgtatccataccaaatcgtcagggtatttgaccgattttaaacttgattgcagattttaaactcctacgcaacactcaaattctccaatgaaaacatactaaaagcagttctgacaaggtattaaactgatatataaaactgatatataaacttattaggaatgaggaaatgtgtgaaaatgcctcacctaggagagctctggagttaattactctttacaggaacttaaacttatcccacgaacaggtaatttcagtgtttacacgactttagatattgtcaccactgaccaagtcactggtaaggcacatgcacaattactcgtatgagttgtatgctctgggactaaactcaagttatcttaacataactgatcccatattcgttgagtcgctaaggactcaaatctccctaacagccacagaacttagcccgttaaactcgataaagtaattttaactgtttaacaccagattaggaatttggaatccttttcaaggtttagagaagagtcaaatgagttatttgacagtgtctggaactacgtcaaggataaagtaagatacaaacttcaataattcattagaaactttctgttaaaagtgttctcttcctactggcgtcagccgcaagaatacgcccggaaaaagtgaaactactctcgtaatcacagatttaattagatattgtttagagatttgttgagctcagagctggaaaaaactgacttgaattctggggaaatatcaactgttttaaccgttaaaaacgcaaaagggtttgttacaaatataatatttatttaggatcgttcactttaaatgtttggaggctattattaactctattgagatcaaactcaatgacccagattacattgacatttattaccacattttcatgctatcacaactgtcacttgaaggtgatctgttttctttggaaatttcaaagttttggaacttaattttgggtaaaatacgccagaatacgaggggatttctatccccaaccaaggccattcagttactatacacatcagccctcagaaggtatgcaattataatataaatgtctcaggaacattcacaatgaggtaatagaatatataaagcctgtgtaccaaaaactgaatttaagggaccaggagctgttatacgattctctggtatcattgtatggtaatagcgaaactaaggagaaagttgacaaggccgtaaaacgtatattagacgagaagatggctacaattttacctttaatgtgtgggaatatgaggaatgtaaaactgggaactatgggaggtaaaagtgtaatatataaagttagcgaggataaaaagctagtgccgcaaaaattagtaaatgagtttcacgtgttaaacgtagtgaataaagaagttaaagtggtaaaatcgccggcaacgttgatggaactggaagttgtggaaaaaatccacaataatccagaatcatacggcaataaagttgaaattttaataccgaacgaaaaattaaaaacaaagttaaaaagttaaaaattaattgatagttattggatattatgggtttctgagtattaaccaccacaaaatattaagggaaactgagtaaaaaatatattttgtttaatatcatgtaccttatacgttttaataatccatgtttaaacttgtataaatatttttatatctctccagtcacctgattacacattatcgcagcagtactgtagtctctcaaactgtcgaaaaactcaaaaatacctctccatacataattttttgtcattctcaaactgattttcgcaatgccagctgatggcgagaccaattccacccaaaacctgcacactgcagaggaatcactcactaccataactcagccaaaatcacctgtaaaagtcaatatcgacacggttcatccagtagttaacggagatccgcagaatttttcggaatacccagaactaaagaaacaggaccccgaagcctctcttaagaattatgacacgaattccaccgataatcatgtaagctccggtgaactcaatgtaacaaataacgtaaaccactcccaagcaactccacaacaaaatgaacaaaacttaacaaatgaaactgattcatatgatcaaggccaggcccaagaacaggattatctgtacagtaacccggccaacaccaccctgctacataagattctcaacgaaggcggctgtattgacgagattctagcaatgtcaaggaccggcgtcaacgtaaaattcaagaaatctgaaattaaaaagattgtcgaggctgtagaccagcctaagatcctcgtaggacagtctaaaccataccaaattgaaggtcttaagtggcttgtaggtctctatgtcaagggcctgaatggaatcttggcagatgaaatgggactcggtaaaaccttccaaaccattagctttcttgcgtacttgaaggaaactttcagtgtacacggaccacatatggtcttagcgccaaaatccaccattggtaactggatatctgaaattcacagattctgcccctcactcagagtactcaagtttatcggaaacaaagaagaaagagctcaacttattgcctacgaactggatcccgagaagtatgacatcttcgttacctcctacgaaacttgctgcaaagccaaaggacctctaggtaacttttcacactacttttatctttacaattctcattacaattgtttaacattacaatagtttaacattacaatagtttaaaaattacaaatagtttaaaaattataaatagtttaaaatttacagtggtttaatttttttaggaaaattggattggaagtatttgataattgacgaggcgcacaggataaagaacgaggagtcgaagcttagtgaggtcgtcaggctgtttaagactgagtatcgactattgataaccggcactcctctacagaataacctgaaggagttatgggcgcttttgaactttctgttcccggtagttttctcttcatctgaggagtttgaaactgttttcgacctcgtgggacctaaggaattaactcccgaagaacgagagtctaggaacttacaaattgtagcaagacttcatggaattttgaggccgtttatgctaagaaggtcgaagaaagatgtgctcagtgacatgcccccgaaaaacgaactactcctaatggtaccactttccgcaatgcaaaaacaactttaccgcgatttactacggaaaaacgtaccagaacttggcacagacgatagcacaaagtcaggaatacacgtgagtacacagtaatttatccacactaattaccaaattttattactatactttaatttatccacaaattactaaattttattactatactttaatttaccactttttcaacaatttacaactctatcaacaacggttaatgttgtttaggtgcaattacttaatttggcgatgcagcttagaaaggcgtgtaatcatccgtacttgtttgagggctatgaggacagaaacgaggacccgtttggggaacatgtggtccaaaactctggaaagctatgcttagtggacaagcttatcccgagattacttggaaacagtagcaggatactgatattctcacaaatggcgaggatgcttgatattctagaagactactgcaggatgaggaattacctttacttcagaattgacgggaacaccagcggtgaggacagagattaccaaatttcaagctttaaccacccggagagtaaagttaacatttttctcctgagtaccagggccggaggacttggaattaacctcgcaacagcagacgtggtaatcctctatgactccgactggaacccgcaagtagacctccaagcaatcgacagagctcaccgtatcggtcaattaaaaccagtctacgtctataggtactttgaatattattgatagatgaaaattaggttggtgcaccagtatacgattgaggagaagataattgagcgtgctacgctgaagttacaacttgacacggctgtgattcagcatgggagattagcccagaaggagcttctgcagatggtacagtacggcgctgggcatattttcaaggcgggcgtcgaagccatcacagatgaagatttggacgtgattttgagcaaaggccaagagagagctgatttaatgaaccagaaactcatctcaaacaccaagaaacacctgctggactttagcacgtcaaccagcagtaacatctacgagtacctggaagacgacgaaaacgaagaagacaaagaagcctggagtaaactcgaggccctaaaggtacaaaacgaagcacttatcgaacgcgaatccagaagaaaactcagaattgcaaaggaacaaatggaactctacaccaccaacaaatccgacaaacctctactcctccccgtaactatttatttaccctattaattatttaccatgttaattatattaattattaattatattaatcaattatttattttattaattattaactatattaattatttaccatattaattattaattatattaataaattaggaatatcaattttttgataatgtgtcgttgttggcgttgaataagaaggagattgagattggacttactgaggaggaacaacagcagaaagacgaacttttgtccaagggattctcaaactggtcccgaaaagatttcaacaacttcatcaagtaacttttttactcaacttattccataatttttcacaaatatcaattattttgttatttcacaattattccacaactattccataattattcacaattattagataattattttattattagaaattttgacgaatttttagggcgaatgtgatgtatagtaggtatgacattaactcgatagcttcgtttattgaggggaagacgtacgaggaggttgagcagtatagcaagaccttttggcaaaagtataacacgcttccagactgggccaagtacatcaagaaaatagaacaaggagaagagaatctactaaaaatacatcaattacatcaggtatcagtttatactcagttaatttgtcaactgttgtaacaattattagacgattgtgaataagcaaaaacagttaaagaacccgtgggttggcacggaagttctcttctcagcacaccgcgggaagtccatcttctcagaagacgaagacagattcctcatgaacatcatttcactcttcggtataaactatcaattaagttatatattcaaattagtttaatcaacacataattagtttgattaattgttgatgtgtttaggatatgagaagtggagtgtattgttggagttgattcggctggatccgaaatttcagtttaacttgttcttcaggtccagaaacgccctggatatttccaaacgagccgattacataatcaaacacatctccaaagaggtttgcacaccatttcaacatttttttatcattactttacacattaacattagcttacaactttatcattactttacacattaacattagcttacaactttatcattactttacacattaacattactttgtaaattgaacattagtttacaactttatcattattttacaactttatcattattttacaactttatcattactttacacctttatcattactttacaactttaacattagtttgtgaattgaatattagtttgtaaattgagtataatattgttttgataatgaagtgtgatgtatgttttaggcatcgaaggtgggagctggtgagcgtccttcgaagcggggcaggaaggatcattcgacgccggtgtcgaccccagtcaacaactagtctaaatttttattttttaaatttttataaatttacttttattccatagttagttcatgtctgatgattggatagaagttttcgggaatacaaagtttaagccgcgaaaaccccaacggaatcgtcacaggttttacagcaatacacacctgtcaaataagtctagagtgagtttaaatttcgaaaaaattaaactccatgtccataatgtgtacaataattgtcagccgtttttgtcacacctcctgaattgtctcagaaacatacactcatcgaatgtttatatttacgccctcggttgtggaactatagagcactcgtctatggttctgtctaaatcttgtgtatttcaatgggtggtatgtcgaatcctcttaaatttcttaaatgtcaagaaggtcttcattttcgaccctcaaatgtccgctaacgactatcaagtctgggatttactcgtgaatcacaatttcgaacttgaaaaaactgaatttttcaaagaatttcaccaaaacgactgtttgagttatgaaatttcatcgtcagactcacttgatttggatagtgaaaagtcacatgtgctcctgtggatgcctcactgtgagaagttcttatactctgcagttttggacgggattctaacgaaccagtcgccgttacaagtttcgaaatcgttgtctaaagcatttggaaaggagctggagtctaggagttccgacgactcttttgccttttcacagctttcctcctactctgatacttcgttttattctgatgataaatcactgagtgacgagttctctgaactcgaggatttcagcctagaacacactactctggttggaaatagcttgtctgactactcctttgaggatttcaggtataaatcagagttcaactcgtttgaaactcagcttttaccctttgaaactcaccaccagtcgttcaatgacacgtttgtaactaccttttcaaggattagaccttgataatgtgctaaaatgtatgtaaagaattaaattatgtatatatttcacgagtataaatcgtcttcttcaattgggtccatgatgacctcgtcgttttccggccagtcgatgtcgatgtcgttttggcctgtcgagtttctgttcttgtagagcgggtcgaatttcgtcctgaacgcgtcgtatttcgtgatatcactggacgtcacgctgtgcctagcgttggcgagcccttcctggaagtgtttgcgggtaatttcatatttaaattcagttccatttggcattccgttcgcgtcactagagttattcatcatctcctcatgcttgatggcgtctcttatcgccgctcttgctgcaatttgacacatttcagccaagtctgcgcctgagaacccgttggtcttctgcgccaggtatgaaatcgggacattatctgccactggcgacttcttcaaaattgcgttcaggatgctcactctcgctggtaaatccggcaacggtatgtatatcagctggtccagccttcccggcctcaacaacgcctcatccagcaaattcggcctattcgttgccccaatgaagaagatgttcttcttggctcccacgccgtcaatttcagtcagaagctggttcattaccctgtctcctgctccgcccgcgtctccaacattgtttcccctcgacgtgccaatcgagtccagctcatcaaagaataacacacacggagcactcgtcctcgccttatcaaacacctccctcacattcgcctcagactcgccaaaccacatcgtcaacaattcaggacctatccaatatttagtcataagtatttagtaagttatgtgtagatagtggtatatgtgtaaattagtaagttataatgtgtaaattagtgagttatgtgtagatagtaagttatgtgtagatagtggtaaatgtgtaatttggtgagtgaatagtaaatatcgctaaagtgatgtattatctagtattggtaatgaaaacctttgacggagatgaagttggcgctgcattctgaggcgacggctttagccaagagcgtcttaccacatcctacaaataatcaaattgagtaaataaataaataaatgaatggttacaaaagttacctggaggtccgtagaataaaactcccctggagggtgacattccgaacttttcaaatttttctgggtgttcaattgggtaaaggatcatttccctgaggctggctttaacttgttccaggcctccaatgtcgtcccacttaacatttgggatctcgacaacggtttcacggagtgacgacgggttacacgtgttcattgcgttgttgaagtgctcctgagtaaccgccaaagagtccaaaatgctcgagtctatcgtgtcatcctccaagtcaatcacgcccatcttctccctaatacaactcaacgcactctcagtacataactgagccaaatccgctccctacacaaaataactcaattcattcattaacttaatttattaactttaataaaataatttaatgaaataatttagtaaaatgtgataaaatgtgataaaataatgtggacaaaacaatgtaattatttaagaggatacaacaaaaccgtgagagtttgcggctagttcttctaatttgacttgggggtcgagtttcatgttccttgtgtggatctttaaaatctccaagcggccctggtcatcaggtactcctacacattaacattagtataaaaatattaatattaatgtattatacctatatcaatttccttgtcgaagcgtccgaatcttctaagtgctgggtcaattgagttttggcggttagttgcagcaatgacgaccacttgtcctctgccttttaatccgtccatgagtgttagtagttgagaaacaactctgcgttcaacttcgccgtttgttttctctcttttcggcgctattgagtcgatctcgtcaatgaatatgattgacggcgcgttcttctcagcctctgcaaatgctctacgcaggttactctcagcctctccggccatcttactcattacctccggaccgttaattaaaaagaaaaatgcgccagtctcattagcaacagctcgcgcaatcaacgtcttaccactacctaacatccaattaattattgacaaattttaatcatacaaatattaattatatgaataaataaataattatataaataaataattaattaaatgttgaattacctggaggtccgtagagtagtactcctctgggtggtttaactcctagtgttttgaaaagtccagggtgtcttagtggcagttcaatcatttccctaatttgtgccatttgtctcctgcatcctccaatatcgtcgtagcctacatcgtcgagcttctcctcgtcctcgcgttttatgggatcaccttcgtggaaaataatagtatccggagcaactatgcagtattcgcccgggtcaacctctactaccttgaactctaccgccttgaaggcgcctcggactagaaacaagtcacccttcttcacgggtctgtaactctctaaaaagtaaggcttaaggtacacattgaacagagactcctttgagagaccctcaacggtgtcgtctattgggagcacttgtatcttctttccgtaggggacgtctggacagggtgaaactctgacaaagtctcctagcataactctcagattcttcctgacgatcttgttcatccgcgcctttgtctcgtcgaggtcgttgtcagccagaactatacagacggtcgaacgcctctttttaccccttagtaatatcgtgtcacctctgaacaggcctaactcctcgatcctcctagggttaagcgccacgacggagttgtcgtcattgagagcatcttcaaccaggagacggtttagataacgtctttccttctgttctaaatcctcttcggggacagaattttggttagtttcgtttttattatttttttgattattttggttgtccgaatttaaattttgtgtcatttctatattctactccaactataaaatttgaacttaacttccagaaattgttacacttttaataatttcgccctttaaaataataaactgcaataataaatgttatatagtctacaaatcgtgctaatttggtattacatagcagaaaaagatttaatacaccagaaaccagacgtttacaagtgctattaaataaatctacacataaattcggaaaatatctaaaataaattttagatgtttagtaaatattgacaaatttaaaaaatcatataatattattttctgtacaaacccccataggttacatggctcaaattaaacatcaaatttcttaacatcagttataacatccacaccaatcttcctcagaatgcaccttactacttaattttacttttttaaaatttcatacaattaaactatttttcaactcaacattataaaaattataaaaatatcattcatcaaacgttaggaatcaattaattaaatttgttcatcttatcttttaatatgtaaactgattctttatcatagcattttactgtttaattacttaatttaacacatttggtgatcttacacattttgttaggagtttattattacaataaatttatcaataagaagaattgtttgttctattttatttacgaatagtttaataaataaagtataaatgtattttttggaatatctgttgaaaactgtatctctgtgcaaaaattaaattactggaaaatttaaataaatttaagctatcaaatagtattgaaaaaataataaaaacccaatgtgagaaataataattggataaaaatgttttaaatagtaaaaataattcaaatatttatacatgccctgaagtacacagaagtttaaaataaggagtcgaaacaacacacgaaaacaaataaattttatttaaatataaaaatttcttaatattctaaattttatgttattaaagtaaaatttgaattaacattgtcatgtcaggtggattatatgatttagaatatttacctgaatttgtttacattctctttgttttaagttttgtatatgtttgttgtaattttaaacatgactctataaatttgtagtcctcaaatggacctcatttcgccttgtttttcatatgatattattagtatcatatagcttttaaaatggctggctctagacaacaacctaggcgaattcgttgttttagtttcagaagaaggcgaaatgtattcgattacgtcaatgacccttcgagaaaccaccaacctgagctaactactccaaattgtgatacctctttaaagtcctcaaaggtttccaaggacgacgaagttaaatctgacaccactgatgatctggaagactccacattcgataaaaacaaacacgaacgccataacctgccctcctcaaactatactccccaaaaggataaagctttatctaaaaaatccagcaccaagagtaaattaaatactccaaggtcctctatacatgatcctacactatccagtaaaccgtcaaatgatcacgtatccaatgaagccgattatctaggttacggaatggtcgatttaccaaaagaccgtagagtaccactattactacatttatttatttaatatatatttcatttttaactatggtacagatgagtggttcgaataaccgtggctcattttcgaagagttcgacatttcagtctgtgggtgcggatgaatctcaggatcgagatattttcagaagtggacgaaagttcataatcggaggtaaacaaacggatggaaaaccctcaattgagcgatgtatctgggaactagttgagaagagaggctggggaatgatgaatagtagttggagcatgatgggaccgcgagtatttaaccaagtggttgagtttttaacgggaatagagatttctttgtgccgccaagttagcaagggctggtataagaacgtgactgacgtcatggtttcacgttcagaggtgattgtagatgcgtttaaaaaaacttacagggacatgttaacctacgatcgtagctacattttgttccaaccagttttaactgccataaaggcaatgagaattgatgtgattatcagggcaaaagtcgagcctcagtgcacaatgcataaaaattcctttggctacacttactcataccactccttaactgtgtcaaaggacgggactccaaacgggaacgaatctggaagatccagggacggtaaagatgtttttggactctttaatcgcaaatcctcaaaaaataaaaatttaaacacgcatggatcacagtctggttcgaaaaatgcaactggaggctccagcaaaaagtcgatttttattaacaaattcattttcgaggttttgaaaaagaacagttccagaagcattacatttacccgggacctctccagcatgcatagagaagatattaacctcgcaaccaccgccagcatttcccaggtgtgcgaaggagattacatcgaggttcccatcacgctgatcaacgccattggtgccacagacgtccagtcaattaagtttttgcccctggtaaaggatattatcaccaacacgccatctcaacttgaccttttacacagggaatggtacaccgtcgagccaaactcaaagtacctcgaacagctcttcccccaaaatattaactcttactccatcatacacccacataaactgttaccgcagctggtacaccaagtgacccaagtcgcaggaatcgacgtcatcacatccaaatccagctatgtcgcctcaaacctaggtacataacaacctccaatacttggattatttcgataaacatagattatttgaatagatattatacattaaattggataaatatatattatttggataaatattctatagatagttaaattggatggatataatttattaggtgtggttgcggaatcgtgtaatataattggtcatacggtggaggttgtggcgaagaatgagccgataatatgcatgattcagagaataggacttcagcatgacagaatatgtcatgttcagctaagaccggtaagtatataacacctgtgtatgtattaaccttctttagggcgatgtgttgcaattttatctgacaaagggatgaatgtaggtcgattttttgaaaatgaaaattcgatttgctggctgaggataattttgagatttacccacaaattctgctagaatctcgattttactctatcccccctgcatgccaatgtttatttaatatttgtatgatctttaattttgtatagtagaatgaagtatattttatttattttaatttcaacttgcgtggtttcctcggggaagtcggctctggaggataagattaccagatccatgatacacaccgattacgaagttagaaggtacatgactaagtgttttgaggactgtaaaaattatataaatgagattgatgattatattcagaaaattgaggccgctaggttcaaggaaagttccaagaaacacgccgccaaattcaggctccactataaggaattctatggtgaattcaaaaaattaagaaccacgtacgaagcatataaatttgatgaaagcgatccactgtttagaagtaaatttcgcgagaatctcactgtgtttgataaaacattcaggaaggccagctccacatactctcgctccttcaggagcgtaactaaatccctgacgaagctggatgaaagtaaaatggcctatatggatacagaagtgtataaaaagtgtgagaaggctactttaataacaactcacagactcagggctattgaacaaatggttaaaatattagaaatcagaggagatgaatgcggtcccttatctaacagagaacagttccacaaggacgccactgataaaataaatcgtttacgtgatgaaagtaagaaggcgatagatgagttcccggtaacagtagtcaacgaggagcaatataacaagctgggcgaagttgaggaacgagtaaagaccttgttcgaaactggaattaaaaccctggaagagtttgacgaaaatcttcggaaaatgtatgaatctaaaggaggaaaatacaacgatgattttagaaaattaattaaattctttgaaagaatccccttcagattatcaagttttgtcactccaaataccctgggatccatgattatcgtcgctttcttactcatgaacttttaacaacattattttggttttaatcttttctttttaaatttactcgtaatgtgtatgctatggggattcattacgcttttctcttgatttctctattaatacattaatttaataaataattattatatattttatcttttaatttattgtatattaattgtttatgttggaaatattcgagtgtattgaatatgtccccggaatctgacctggatcctactcctcactggatctgctctctagaggatgagttaggctcattaatctgggtaacacttagagacgacaccttttacgtcggtttatttaaaagcttcgatcaatttggaaacattgttattaccgacgctgttaaaaagattattttaaacaataaaaggtccttctcagatatttactgcggttcgtaacttatacactaatttatgcaactaaataactaacaatatgggtgagttaatggtatattagggtacactgtaatcagaggcgagagtatatcgtatttctgtgcaatagatgttattttgtatctaaatctctttaattacgagagtttagttgataggtcatgggttaataaattgtacaatatggctaaagtcagaggaattaactacggctcaatgaagtttgatgttgttttaaattatataccaattgaagaagcgttgagactggaaaagttggaaaatgaatctaaaggatatactaaattgtcaatagacgacatcatcgcaaatgaataaattataatatcattttataaatttattaatacttatttatatctcatctaaccatcccattgtgatggtataaattgatggtaaattagaagtaaatgtttagtgacaaacagtggagctaaacagtttaatcaaataattatgtgtatatttatgggtaagtttatatgttgtgcttggtttattttatattaattattttttgtataattgctttcacttttcaatttggcaattttttgtattataatggtataatatttaattattaaactttattttgtaaatgacctcaacttctttattccgaggagagcttcttttaacaccagaagaagccaatgattttaacaaggtaatttacatcaaaatccacatattttatgtcatattttaagatttacgctaaataatgtttagaatcttgaaaatgcctgtttggatatatacggtcttaattcacagtttattccctggagagtttccccaattgaccagccgatcagagcccatacgccttcatcaatatcgcttgcaacagtcctaagggaactcgatgccacagtacttttaatcaatttattccctaaatttaatttatttcagattgatcccgccgagatcataaaacaaccactcaacagaaggtaaataaatctaaacataattttatatatttataaataattttattatattattccaaatatattaactgatgatatggtttagatcaagttttaaggtagaaacttcaccgtcgcctcggcctacgacaccgccgtcgcctaaaaaagcgcctgaggttaaacctgaggttaagagaagacctacgtttgtcctggacgagaagatcgaatatgatatggagtcggatttttataaactattacacccgcctgaggataagcttaatgaacttccagattgggccaggagaatccataaaatcctgaaggatgtttgttatcagccgtgcgttaaaccctttttgaagtattttaaaaataaaaagcttaatgccttaaactccacagaaacttcgcaatctgcgcacaagagtaaaaaatctgagaagtctgacaagggcgatgaccttgattttgatgatcttagtgacgacttacatgacattctaatggacattgacgacgatgccaacaccgcagccaaggatgctcaagataagaaggagcttgattctgaggttaccactcctcaaaacgttgacaactacgttaaaattaataatctctcagttgaagataatgcagatgcccataaaacacaagatttaacacaaaaccatgacactaataatgaaaaagctaataaagattctctagaatctactacacaatatgatacacaaccaaatcaatctacaaaagatgaaacacaacccaaccaatctacaacacaatgtggcacacaaccaaatcaatctacaaaagatgacacacaacttaatcaatcaaattctcaatctaatcctaaactgaatgatcaaaagaatcctgaccctgaggtaagatcgggtaaagtggttgataacaagccaaaggagttggatcttgagaacattttagaatcattgctgatgaatgagtttgagaattcctcaaaggttttcagcctaatatatttgtttttggttaaacagttcaaggtcataccgcctggtactcttgaatggatgtgtgctcaggacatgtcaattaaacttgatgagttgaggatcgctgagggattaatggactccgagaaactccactcctttcctgatgatactcttgttccccaggttataccgccgccccttgaacctgctccgcctgaaattaaaaaggccagaacctccatggaggactttgaacatgaaattgcactaattaataaatccgatgactacaactccacaatctcacttccaggtaataacatccttaatccactcatttgaacttttataaaatatatatccaattgtttattttaattaagttaacttggaactttataccaactaaaattactataaattatacaaatgttgacaaaattgtgtagaagttaagaatataactgatgaggagcggatggagttttatagtaacgtgactgaactggaccaggaatatcaacttgaggtattcactattcttattatacatgttaatgtgtattagttatttacggtgtttgaacatgctgcggtttggaagattgtcggtaatggcgagatcgagttggatgacaggaacactgaccccaagatctacaggtacaaataatactctctaatatattctaggggaatgctgaagtgggtgaaggagaagaagaaagtagtggcgacaacgttccaggaacccgagattgacctgtcgcaaatgacctcagagattgcagtttaagtaacatatactctaatttgctacattagtctttaaactagacagtgcatcagtcttatacagatttgtacagtgtgtattatttgaatcgagagtatgattgaatccagtatgtgattgaatacagtatacaattgaatccggaatatgattgaatcgagaatatgattgagttgagatgggagttactcatttaggtgtttatcccaaagtggatcattcatgaaaatgtcaagtcttttgcgagaaaagtcctcaaagtcaaagtcgatattcgacaaacaactctgcaaaaccccccaaagtcctaaattaccaccatttatcctcataaaattgtataaaatcgataatgtagtggaaaattgtataaacaaatgtaataaatatttaagtattaataccccaaaggagatgagaagcgaggaagaaaggctcaatttcagtggcgagttcgtcaacgcaatcctcagattggaggacgtggatttggccacaaaagtcttccaggcttggtcgccactcgatgatgtcatacttgagatattccctgataaagtccctcctcatctcagcactaggaaacaagtccctattcacgttgttgcccatatactcattcaagtgattcgaaatgtcaaacgcacgctccatacaacaacaatactcaaaatcaataaaacgcacatgatctaatcaatcttatgttaattggtgtaaaactgttagttaatgtgtaactgtaaattaatgtgtaactgtgtaaattaatgtgtaaatgtgtaaattaatgtataactgttagttaatgtgtaactgtttaaattaatgagtaagtgtgtagattgtgtgaaaaggtaccgtcaggtttgagaatgatgtttccggctaataaatcagagtggcaaagaaccaaaggagagtttttagtattacaaatgacctcaagtaagggaattctctaaataaacattaaccaacagttgacagagtggtaactgaataattaattgaataattaattgaataattaaacttagtaactgaataggctaatggtgggtggaaaatacctttccgatagtttgcaggtctacaccggggatagatttgttcattttctttgtgtatttattgacaagccgatagaatttccaaacggtaggccaaagttcagacctaggtttaccatctccctaataaaatcaataaatgagtttagcataccccgtgaattagtttactcatctcaccatcgacggagattgagtgcagttttttaagattttgagcaatttggaccatatacttggagccgtacaggtcatactcggtgagatttcgaccctcaatccattcctcaatttgacctccctaagcgtaaataaattaaaccaaacaaaccttaaagtaacagtaaatggatttgccgatttgaaactttgaaagaagctcatggatataatgctcccgggtcctgtcaaccatcttagaggaactcgcacctaacaaattttttaggtgaaataaaaattaaattttataatatataaaaatttatatttgatattttgttaccgaaaacgcgaacgattacagttttgttattgagggtgttggtgaccttgtagagactattagtaattcctccaccgacgtgttcgacatttaaattgttatacttattaaactcttttgaggagttacaatttttatttacatatggtggaaggccaagctgtttaggagcaagcttaacgcaatagtcaatacactgttcatcactgatggaaatggagtccaattcatcatcttctgactcctcagactgtgaatcctcgggataaagacgcatggacttaatggaggaatttctagagcaattatatgacatactgtaaaatcaacataaattttacaaaaaagtgaccacgacaatactaaaataaaagacgacaacagtgatataataacagaattttatatattcatttgatatgtaaagtataaaactaatattatataattaataaaaaacaaattttagtgcacatttgtctgtacgttcccacatctacaaccataccactctacacaacattaattgaaacctcaatttctcatccaattttcatacaacattattaattattacatttttctctttttaagttaatttctcgtttcccttttgtttaaaatttttattatctcccccctttttatttgctaaatccgcatattcatacgttaggtacactaaattcctttgtgttaattgtttaaattcttatttctgtttggatggtcattaaaaatcatttgtcgccggtggttattgattttgagacgatgtatcgttcaagttcataaatcgtatcttcattcctatttttgttcttcaaactcgcctctttaatcatttttttaacaactctctaaaccattttaagcctactaattcttacctgtaataggtcagttgatattaactctccagctgtgagtctgtacttaaggtcatggaacatcattgatctgtacagggcattcaactcctttgaatacgccggaggtaagtccggtacctaatacatcatcagtcatattaataaggtccaataaattttgtaagtttggttattaaacacttgttattgtatttgtgtaccttttgctcattgattagtcttgtgagttctacaattcctttagcgttgtggaacggtgttctgaatgtgcaaagttcataaactatacacccaagagcccaaatatctgatgggaaaccataactcagaccctaaccataattaataattcaagaacatacgttgacaagttccgggctgaagtagtatggtgtaccaataagtgtacttgtgttatcagaggttctattcagtgatttactcactccgaaatcacatatcttcaagttcttattcgagtcgattaaaatattcaacgtcttcaaatctaatcatatttttacaccttataggttaaaccgatcatacaattgatcacacaattgatcatacagttgattatacaattgattatgggttagatgaataatgtgagtatgtattgttacctctgtgaagagtgtatcttttatgtaggaatttaagggctgagaggagttgtacaagccatatgagtatccgttcttctcgtattggcttgtttattttccttctgtatgctatatatttgtgcaaatcacctcctaaaacatgtcaaacaggtaaaaattacctttgcaatattctgttaagatgcacaggtacttcctgtcaatgtaactgtaaatgtactttacaatgaaagggtggtcaatttttgagattatctaaaaaactttatcctatcacacattacctcgatttcattcagacataaatcacgctcaaaatccgacaaaagactaatattgaacctttttctcacaacactaatgattactatgtgtggattaaaacgtactaatttccttcattgtcacaaattaaatcagtgtttccatacggtccctcacacagtgatttcaccaccttgaagtttttctcaattatattttggtccaaaacctaaaaattattattaacaggttcattatactatgaatgtgttaataaattgagtgattaagttaataaatttaccaattcgtttgttttggtcattttgaattaagtttatcaaattgatctattgggaaatgtgtaaaatttcaacagatccttgaacacgttttcatgagatttttgtatatattaaatacacacaaattttaaacacaaatcttaaatatattttagataaatcaatttgttgatttcgttttgatatgattcctattaacgactaggaatctctgtgtatataatattatgattaatgtgtaaataaaatcagcaattgcaatatatatatttgtattaatataatttaggtgctggatcccaaattataagttgaatcagctgttaacatatatgttattttaagacatccagttcataaatcaaatttgactagaattctacgttttaacaccaagttcgcactagaaattattgtttaatttgaaaaattcatttttctaaagaattctagaatatttattattttcctccctaatgtgtaaaataaccaattcctcgcgtactacacatttaacaaatactatactgaattaatgaataaattaatgtaaatatataatttgtatagtaaagttaaatcaaattacattttggaaaattatatgttacaatgttagctgatgaaaagcggtaggtctgacatgtcgccgtatttattcctgagtgaggcctgtttcttaagttgctcattacagaagttgggaatatcacgattatgttctcgaacgaggtcacagagtactccgtcaagggcaagtgaagtgttcaggaggcagtttgagagcggattttgaggctcctgaggctccaagtccgagagtgtagaaattgaagcgaggtcgtccccgtcaatctcattactcagctgatgcaaatacgtagtcaaatccatctttgactttgtgagatccagtgggtcaaacaggtttttgaacactgttgagcttttaatacttgaggacattcgagacaataatcccactccagaaccattcccatttacatgtaaaacatgagaacccatcccagatacattggcatttagtagaccgaggctgttgaagagttgtaggatgtgttgagttgcagattcgttgacttcgagttcgactaagattgattgaaaaggagtaaatagttgataattaagataaatatgtaaatcaaaccggcttcgcccatgtgcgatttaacgtttctgaggaaacacttgaagtgagtttgatcatcatcgcccatatgcgggtgcaataccaactccttatctgacatttgagaacttaacgacctcacctcagacagtgacgatgttagtcttctaattgtctcctcaacttgtttcttcacgtcatcagattcttctaactcatcttttgacatgctggctactaagctcaaagtcttttggacctcttggacgtctgggttttcatcaaactgtttcaacaaattgttccacttctccactgttttcctcaaatcctcagacttctcagatgaaaattcatcatcctgctgatccgatgaaccactgctttgatcgtccgaactgttatcacttgagttttgatcactagaattattgaggtaattgtagtctgaggaatttgagggtgaaacagctcgagagtctccctcataggtagttgacccttcctggttcaagagagcctgatggtcaaacacttcagagtcagtcaccagtgactggttatcagcagtgttagtagtggttgtggccttgagttcagaaggtgttttcgggcttgttacatatttatttggtgagcgcaggcatacgcaggaaggcattttctcaggcgaatgcaattaatcagatgtgtagtctgaaagttaaatattcgaatgaaacaaataaattaaatcagagtatatcaagaataaatattaaaacctttaagatactggatttaaaacgttaaaatatgcaattaaaaccttaaataaattactaatttcaaaacttgcgagttgtggtattaaaaactgagcatgtaacttaaactgcaaaatacatcaaaattacccacttttatcacacacttaagcaaatcataaaatactgtacattgtataaatatttaaactgaattctaatgtatatgtggtctttttctaccatatgactgcctgacctggcactccatcactaaaccacaaaacttcctaaatcccaccatctaactcttttgtactcatttttacactttaaattatttattctttatttttatcccattcatgcattacacattttacattctagaatccaactattccacctacatactaaccatttacccagaaaaataatcacatactcaataaatattcaacaaaacaatacaaatagtgatagaattatataaataataaataaattgtatatataaaaatgtttgaaaggatagtttgatgtgaaaaaaattaaacacgtcgaatagacttgaaaaaagctaggtgtgaaatggaaggagtcccactctgacagactttaatttacacgtaaggtttagctggcctgcttgagtactttgatagcctcgtcgatcttagccttgagctggtcgttgtcctcgaggagctggagcagttcgtgattatcaatttccagcatcatcccggtgatcttgccagcgaggtcagggttgtccctggcgataattgggaacagtctctctccaatcatctgtttctgcatggcaacgtcgtccacctgaacgtttccattcacgacgtactgcggatgcattggcatttccctgttccttgcctgaggtgtgaacttgaacgcgcttacaggcatctggtgttggtgtgtcttcgggttactgctatccctccttagtcctacggcgcctggcaccatgttacttgggactcccatattccccggaagcacgtgtggcatgtttgggggtactacatggtgaggcaagttaccgtgcactcccatgttccctgaggccaccacgtgtgccatgctcgggggcactactgacggataatgtggaatgttacttggaatgttagcactgctcatcggtgacatgtttcgagcgttagctgccggtgccttggccacgttccgcactgagtagttagcgtatgagttgactggtgggaagttagcgttgtagtttggtggatagttgttggcctgggggttattcgtggtaaagtttggtgggaacttcttgtttggtcctggtacgctgttggggaatgttggcgctgggaacggtctcggataatagagcgactgcgaaggtagctcgttgaagagcacatcccgcgaatgaggttcgaatcctctacgctgttgcatcctcatcatcctctggtccctcttctcagctaatcctacatacaaaggtttccccttgaccagtttcaggtgcatagctgctattgcctttgtggcttcctgaggattagtaaagcatacaaacccaaatccacgtgaatggttattagcgtctagcattactttactgctggtaattgttccaaatggcttaaaaagctcacctagtgactcgtcgtcaaatgagtcatccaggttcttgatgtacaagttacttgtaacgcgcttgtcctcctgagccattgtggagttgttgaactgggcgcggagtaaattctgacgctttgccttgtcctggtgagggcataccagcaacggctcagaagactcttcaagcttcaaatcgttcaaagtgttaactacttcctttgctacttccggctccttgtagttaacaaatgcaaacctcctgcccttagagtcttccttcagcatcatgctagtgatttctccatacttttcaaggaattgccgtagagcttcttcgtcccagtctgcagggaagttcctaacgtataaattcgtgaatacttcctcagactcacggtcttgcttacgtaggaacggggctacctcaacccttttccctcctattagcatcccgtttaccttctctatggcttcgcgagcgctttcttcgttttcatagtgtacaaagccgtaacgtttcgaagctccggaggcgtcaacagcaactttacagcttagaattggtccaaaatgtgaaaatgtgtcataaagactcttcgtgtctatgctcttgtccaggttcttgacaaatatgttcccagctcctgaacgacgtagtgacgggtccctgttactccacatgatcctcgtcgggtgacccttaatctcaatgtagttcaaattctccaaagcttcctgtgcgtcctgagtactgtaatagttcacgtaggcgtagcccagggacttgcgggtaacggagtccctgcaaacccttatcgaggccacaggtcccacagtgttaaagacctcgtataaaaccgcctcagtgacgtcaggcttcaagtctcccacgtacagactagcggaggaaaatacctgcgtgtccctcatgggcatcatcattaagttctcagaagggacaggtttgacggtggaagccatggttaaactttagaaaaccataaatatttaaaataattttagaagtgtagaatcagactaaatacaaaaaaatgaaataaaaaaggtccagaataaccaagcgaattaaaattatggccaagcactaaaccaattcgggaaaaaagttagcaactgaaaaaatatccaacagcataatattatgtttagtaaaaattatagatctccttgttattttaaatagaatccgtttaaatcagtaaaataaaattgttatagcgacatcagacaaatatgagtggatatacacctaacttgtttatttaattttttttcaccttttttttattatatttatgtattttcacaatctaaaaatggatgatcattatgtttttgatctattatgtgtatagggggtggggggactatctcatttatcgggcatatcgataaaaagatctcgaaattacgctacctgcctacatattctaaatatttagctgaattcatactatattgactcaacctcgatgatctaccagaattctaactttaattccaattaaacagattaattattaggaatctcatgcccagcgccagcttattccctttacacgatgtaaatgatattcattttccaatttttatactaattatactatagggagacttctgatactcagaaggttgacaatttagattactgccttaaaaatctcatcgcaattgatgccactcccacctctaccgaactattacacaataacaagttagataaattccactaaaattacttatttacatattttacaccaattttaactttttacaattctctatttcacaatttattatttaacttaattatttatgttttatgttacacatttataatttttagtttattgaaattatcgtgtgaaaatgctcagctcttggttaataagatttttggattaaatcgcactactacttcagatggagtttttgctgaacttccatctactgatgagatagtcatgcccagagtatttccactccctaaacccagagagaagaccagatgggagatattcgcaggttagtaccaaattattaatagtatgttccagagttaaagggaattaagaagaggaaaaggtctagaaaggtgtttgatcctacggttaatgactgggtacctcgttggggatataaatcaataaagaaaaataaactcaataaacctccaatcatggaagttaaaccaggtaatacacaatttaactttaatttcatgatatctcatgataacttaatggaatatgattataatttaatggaatatgaccatgttttaggttctgatgataatgtgcttgaccttgaatccgctaagaaatcagtaatgaaatctaaacagaagctaagagaggtaatttaaccattacatatgatgtttagctgagaaataagatggagcaaagtgccagaaaagataaatcgcaattaaaaaaaacacttcaaaggtataaaatacgcattaatcaaattaaaacacgttaaatattgtaaatattttactaaagaatcatttgtagagtcaaggaatcgacaaaaggctgtggaaaacatggaaaattgaaggggaaaactaaggtttcaattaagaggaaaccagtcacacagtcacttcaatccgagaaggattcatacctctcaagcattaagaaattaaacctgtaaatgcactcttgtaataatgtattataaattattctcattcatttattatgttgtttattttactgttacaagacccgacttacataattataatattaaatataattacataataagataaatttattgattaaaaataagttgatttagtggttagttgttttttatttaaatttactcttgtaaaataaattaatatgaaatcaagtctagttagtccagtatgtgtaaacatactgaagaatataaaatacgcagccttccctaaaactaatagatattatacaagtacaattatacctaaatacactcgatttaataaatttcaaccctttcaatactctattgcgagacgttattcatccgttgaagattccaaggcttcggaacaaaaaacaactaaagattccaatgaggaacagaatttagaagaggaaaacagtaaagaagaaacaaatttaactccagaagagcttctgaaccaagagaacgactcactcaaacaggtcagttcaaccaaaattttacatacatcctagttataatctccttaagtacacttataaaattatataaatatagttatattatatatgtttttaatattttgtgtagaagttgagcactctggagaccaagctgaaggagttggagttgaagtataagatgagcttgagtaattgtgataacttgtgtaagattcacaagaaagagttggaaaacacaaagatttacgcagtaacagagtttgctaaggggttgctagaagtagctgatacctttgaattagccttaaaacacctgggagaatcagagtccaacaactctaatgattttgttgacgggattaaaatgacagaaagcatgcttcaccagacttttgagaagtttgggattaagaaatatgaaagcctaatggaggatttcgatcccatgatccatgaagccatgtttgaggttaaggacagggacacacacaacaaggttgtacaagttgttaaaaacggatataccataagtggacgcgttttaagaccagctaaagttggtgtatcaagacgtcaatgatatactttaatgtagtacaaatgtctgtatcctattatacaatgtgtaatatacatttcatattgaccacagtataaacataaaacgcaatactcataattgtattaaaattttgaatatattaataaaattaatgggatcagatgatcatatcgactttgggtgggagagcgttttcgttgggaagtccatcattaaatgattcacaataatccctgccagtaaccatgagccgtctttgtttggcaaaaagaccgggattgacaccttgctgtatacgattacggtcatatgactcctgagttaaaatggtaaccttggatccggggtaaactctatttatcaagtaacgaaggtaacatttaattccatacttgtgcctgatgggtccgtaatatagaaatgaaaaatgtcccatcttagcaccgagaattctcaaaactccacaatttctatcattaaacaccttgtagacgttttttattttgtcaaactctgcctggtcaatgtcaatgccaccgcatgcagtctcaggactagtgtgaatatcctcagtatctcccaacccctcctcagttatataaggtaattcaccctttcctggcacatgaaacctaatatataatgaacctaataattagaaaattaatataaaaatattactatttgtgtgtgtataaaatgaatatttgtgaagaaattactaaattgtatgagaggaactaacatgttttgagctagtctattggcatattcatagtttaaggtaacgttggcacgaactggaccacgctcaaatgcttgatgtatcttacgcctaggacctcgtttaggtgaatcatcaaagagtggataagcccatatcatatacaagttagtattaaacttgggaaatgtatttctagttattataaacccatttacggttaaaatttcaaggaatatttttagataaataagaattctcatatattccttaacatggttaaagtttgtttaattaattgagttccgggaaaacaaatactacacacagaagatcaagttttcatagtatttattttaaaatgtgtaatacaatgaaacaatattatgaataattttaaggaatctgatggggtataagtaacgattaattatgtattttaaagattgtttgggattgtaattggatattaatagtgccaatcacctcctataataaatgtatttatgtaaatttacagtttagttgggccaatattgtaaaatatgggtttttgtcgttaaaactgattttatcctcagaatcacaaagtatatctcaataaacagttttaaacaccattcgcgggttttaaatattattcattggatttattctttggatttgtaatttattttccccaatttaaaatagaattggttacatcagtcaagaatcttttataatttatcgtaacaattaaaaatgaagttggtcagattccttatgaaattagccaatgaggaactaacacttgagcttaaaaacggtacagtgatcactggcgttgtgattggcattgacatatcaatgaacactcacctgaagagcgtaaaggttgtaactaaaggccctgatggaaaggaagggacaaatgtagttcttttagaccacctcacagtcagaggtaacaatatccgttacttcctcctatcagaaagtattcccctggatacgcttttgatagatgacacaccagtacaaaagccaagtaaaactaagttcagttctgtaaggggtagaggcagaggtagaggtggtcctccaagaggaagaggtagatttggaggtcaaaggaaatgatttaaatttatttaattcaaagttaatctgttgaaatgtttatgttacatttattcaatagttatcgatcttaaatttgtttttggatagttttatattatttatgatatatttagtaaaatttggtggctttgagtatttttgaaggttttattttgggactgattctcctattttgttgggaaattaatttgaatttaatcagattctttttattatattttttaaataatttaattttaaaatattttataaaacttttagtttgtaaaataaaatttttctccaaatatagttccattactcactaaattataatatttattaacattccgtttgtttaccataattcgatcatgatttaattaattttgtattaaaatgattcggagagttttatttaaccggcgaatctcaaataatattctcatcagatatcgcaatgtcaataatatcgacgcttttaatcgtactgaattaaccgatcctgttaatccttttgtttcggggactaatagattcttttcctctgattcgtttatgcaaactgttttgaaacaggttaagaaggatttggagaaggataagagtctccaggaggccatggaaaagctggaaagtgagtctcagatctctgagaagatttcaaggatttctgaatactttgagaagacgcgggatttcagcaaggactgcattaacaagttatcagagactaagaattcaaagattgtcaaaaactgcctcgattcaggtacttttcaactatttaatcatttttagccaagagtattgctgtgggatttgataaggtttccagttacttatacgatgaaaaaggacatgccaagaggattagaagtaaaatgaatctcaagcaacgaacttctaagtctagttctaaggagcagaaggaagaaacggtactaactgaggctaaagagtctggagatgatactcctgataattcacttgtacttgccaaagagtctgtttgggacagatttggcagtaaaattcgagatatgccctttctatacgaatttttcggtatccactcacctaaccggttaatccgttagttaatcttacgagttaactaatattatctaattaatttgtagagaatccgataatatcaaagttgtttggagatacaagtttggcctcagccttacgtgagatgaagcgacttgatccaagctttaatttaccagacctcgttgaacttgtggaacacgtaatagctcctcacgttgtcgagtcatatctcaaaggcgacggagaagctttaaaattggtattccctcaataaattaatttgtttagcactgtggagaagtggcgtttaatatactaaacacatcaataaaggagaggaatttacagaaactcgtgctagatccctcaattctcatactcaaaaacgtggaactcaagggtaatttcacaataatttacacataataatttacgcataattatttatacgtaataatttacacataataattcattgttgtaggagggatgaaggtgaaggagggtgatccttggctaatattcaactttacaacacaacagataaactgtctaagagataccaaaggcaaagtttgtgcaggtaattgtcatagtgttaacaatgtgttaggacaaattgatgatatcagagaagtggtatactcaattgccatttcaagacatccgaaccctctagaaacactagaatacccatacctggtattaaatactatcatactatcattataatagtatataaatgtatattattacaatattgatgtaataggttaatgaaattgcaattattagtaacagaccatgctggtaactgttaggttggatgtgccgtaggtgtaaaattaacatcacgatttctacaaattaatacattacacatctgtatattaactatatatttatatgttaagtgtatggtagttacttgagttgtttttcgtattccatttgacgttgaaagtgttgtctgggagtgaccgcgattcttttatttacaacaattgaaacagtttcaattatacctgtgaatatattattggagtgaataacttacttaggagaacaccgccgatgaaggcatttctggaggcgttctttaagcctcctctgagtgctagaacacctccagtcacaaaaccactgaaaatagcattccagtgatcctctttattacgtaaagcttggaaggtacagtcgaaggtagagaaagtgcctccccaaatggcgaaattgccgccaagaaccggagatttagaactggcagtatataaagcgttttttaaaattaaacctctaggagaattcttagctccagctataaaatgccagagaaatccaccaacggaacccataccaaaggcgccacccatgtcctcaacaatcctgtcaggacaaggctgccgggatatatctcgtccttgcattagtatatttatatagggatctttaaagaaatttaaagaatattgaaatttttcaaattaatcccaggaatatttgattattgttagaatattgaaataaataagagttcaactcaatatattattaaaaatgtgaaaataatttataataaaactacattatgcgatttaataaaatttttattcttatatataaatgaattttgtgggttattatgagtaacatcaaggcctaataatgatgaaaaaacaattgaattgaattatatacaaattaattgtgattgtaaaataattgttatgtaataaactaaattttttagttaattttgtgttaaaattttgagtttttcatcaaacacttttgctctttcttgtaaatattataaactgtacaattaaagctatgataattactttacaggacgccattgttagtacgcgtagaataaaactagaatgtctaattttggttgtgatttagacgatatcgtcagatcatacctatctacacatgacatatataagcagaattcatatcgcaatacaattcttctatcagttattaacactggaacatcaaattttattcaaattctaaacaatatatacgacgaggtatttaaaataataattattatttcatagggagatgaccccgttgatcgcaaaaatgtattgaacttgttacatgaagtggtttcaaggactgaaaatattttcgactcaggccctgttttagacttgttattgaaatgtttaaagctaactatatgtgttcaattatctctggctacaatgagagcagtgattgaacgacattctaaccctggagcacctacgtattataaagatgtacaacagttccacgactctgtatcccttaagaagatttctgagtatccacaaaagtgtcgaatggattatttagtcatttcagatcacttggtggacctgttcacttcagggaaaataaataaaatcaatttacgtctcatttgtgatgagatatcaggagaaagagaccctagaaatatccttgtgatgtttgatttgttatcgaaattggcaagaaatgtggcgaaagcacctgaggattttgagtgtatttctaggacaatctcagtgtattacccgatccaatttgaaccacccgaaaatgacaccattaaaataactccactacagttaaagaagtcactcctagcctgcttcatctcatctgaccaattgggaccttattcaatggagacattgatagactcgttatgctcagagtttagtctgagccttaattacacatcagtgatttcagatactttgtatttcctcagagcctgtaaaccagtttatcaagcctgtttcaacaactttgtaggtcaattagtacaaatcatgaaattagaactcttagatgagaataagaagatcccagaagaaagtggcgaaccttgtagtgcatttgagttaccatatgatggcgaggattctgaggatattgatcaactaaccatcccaaaggtagtggaagtaggctctaaatactacagaaaatggaactatgtagatgaaaagatacaattatttggtgaaatattgaggttatttgtggaaattatacatacagtggaggaggaactcttgaacgagtttcttaaacttatagctggaaacatatactctaacaactccatagggtacctggtggacattatgtgtgaaaatcacaaagcacacagtaaagtcatagaatttataatagttccagtgctcaggaatgttataatcaatgaaaataacacgccacatgatgtaaataatgttctgaacatcttagtcatgtttattatgcctaagatactcatgaactgtaaatcacaaacaagtaataccaagttaatacagtacctcctatacctaattgatcccaaggaaagtaaattaaacaatatccttcaagttgatgtggttatacagagaaatgtacagtatttgaagcttttaacactgtcttcatgtattatagataataaaatcgcagatcatttgacttcgtttataattgataagatatttcaatcaccacacaatatatttcttaatgatattcatgatgaagttgacgaaatggttactgtaaacaacaaggacctggaggaattatactatttggaatgcttaatttgtatgtataaatgccataatgaaagaaatttaaagattttaactttcttaaacaatatttgttcgaaggttgttgagagtgagtctgattttcacaaatcattgttgagaatttcataccttagaagaagtggaaaacaaattaatatattaaacaaaatgtgtgaacttttcaaagccgtcttggaacactcttcagataactcatctgacaattctctgttggaacgattggttacaaacattttaaagatttcattcaaggcattgaagtgtttgatcgattctaaaagtgtaaggagtttgaattctctagaagttgtgccaggcagtgatgttttcattccatactctagtttgataccatgtgcttttgaacattggaaaagcctaatattaaatctttatagtagagaacaattgttagaagatcttaaaaacttgattcacctttataaagaatcattttacaatgatgaaaagaatattatcaggcttgtattcctaacatcaagtgttccaaggataattaaacaccttagtgaagttgtagaattagatgtcggtactgtactagatgaagatttcagattccttaacatatacatgaataaatgtaataaactaaagagattgaagagtttccaaatagaattggatagttgtggaaatggtaacgagttatcatttccaaacacaatggagttaatgaaccttgaagcggagttgatatgtaatggatactttaataactttgaaaatttgagctcatttgtatactttaacgggtctctgctggtaaaatatgttctaaacaagtatccctttgacattaataccttattaaaaccaattaaagtggttgataattataagttaaagaactttgattatgaagatttgttcctcgtaatcttaccaatttccataaacagagtcaaacctatcattaaacatcaaataattgatgtgagaaatataaagcgaagttctaatgaaaataatgatttagtgagggatgaacagttgtatgaattcttgatgagtagattaagggatgacatttgtgatttagtaccaaattatcaggaaattctgtttaaccctttttcaaaaattgaactttacatttcattgatttcattactgattaacaaaggatttgagagtatagaagctaagtctatggacgtaattatcaaggatgttagggagattttaaacattttcaaagagattagagcaaataataggggttacggaaatgaaaaaaacaacttcgagtgggatttaaccgctgaatatgtacattggtgttttgacaagtacttaatattacttcaagagttactctacggaatttttactacacattcttctaaagagaataaagtgtttaatcagttttttaaaggagatttagaggaaattttggaggatttaatctctgtgtacgaggtgaaccaggtcccttttagtagaattttgacaattttaataattaactccgtgataaaaatggaatctgtgccaattgacgctaaagaaaaggtaaaatttagtattgacataattgctttagttaattaagatgtcgaaggtgtttttgggtgacagtaacaggaaggtaaggaatatcgcagtctcgtgtagacaaaagtggatgagcactctccaggaacattacacaacaaaccagtcttgaaattttaatctgtacaatatttgtcaaattaactttttaaatgtagtatattatttttcatggctaaacatccatcttattcatttagcctagattctaaaacgctcttcacatcttcagacggtacatataaaatacgtatataaatataattaactcaattaaataattaataagcttatgaatgaaattaattaattgattagattctgaaaattatgatttattatcagaaaaattgtggaaggataggattttcctaaaatgtgttaaatcattatcagattatatagtaataccaaggagcaaacttgagaatttatcaagaaatttagttccagcagagttacagattcaagctttgtttgaaatattatgtaaccagaagctacactataataaccccttgaaatataataaatcagtagcaactaaaagttattaccttaaatcactcggattagacctgtcacttgaacttgaccagctaattgacgagtctggaacatcatttgaccacttaaaagtacctcagcaccggacttacatgctaccagccagatatattgatgcgaaacataacttagataccaactttaaagcactagtttcaaagtcatttaaactcctacacactcactgggaggtataaaacacagattattctaaatttaaccatcaaaattgaattatctgataattttgtagaggactggtgttatatcggatggagatgtgggattggaagttgataagaagtataatacaatagcaaaaaatacacttggaaagaacataggctgtacggcaacaccttacttaccacttgaaggatgtaacattttaaaaggactaaggagaatttttaataaaagaccgagtccatttatgataaattctggttctaatacgtacatttgtaataatattccatcattcacattcctattcaaggttaaacagacccttgatagatacggtacctttacgacatgttatgatatgttaggagttgccgtggttagaaatgtgttctcaaaagaccaaatccgtgaaattaaatctaaactatacattaaatccacattggtaatttatgttagtttacctgattgtatattaggccagagaaaatgcatttaaaattctagagaaggacccgaatgtatcagcacttaaatttacaagaggtttcattcattaattatattattttccttaggaagaatcaactgtgttattagagggacaagtttcaatgactctctgtcaccaattcagtcattctggatgccatttgtatactacttaatgaaaagagacaagtatcgtccgtcttgtgttattttcatttaggagaatattcttatcaaatctacaactcatatcttcaggtaatctccatagtaatccccaatataattatatttattggttagactcgatgagctttgtggagccatggcatagggaaaataagaggtctggaatcagtattgtagtaccacttcaagatactaataaatccaacggacgaatgcaatttctaccaggaactcatgtaaaaaataattaattacaacacagtaataatgatttagaatgaaccttcaagactaaatccatacacctgtggtatagtatgtaaattgtatagttaattccaggccctgttggagttgacttgaatgaaggagacgtactaatatacaactcaagtatacttcacagaaatacaagtaagataaaactccaaatccccaatttaatatagtaaatgagagtaatgtgtgtcagtcaatggtagtttttagctatgatcatgtggatacaccaccaccaggtcaaggtaatgaccacattcacggaataagttaatttttaggagttgtaaaatacctattggataactattacggcaatgctatagttaatttaaaccgcttattcatgcaaaagaatataaattttaaatgaaaataaattttaaataacaagaatttaatgtggaaggaggctggggatgtcattttacacattaatacataaattattaaaatgactctaatattactattaaacttatacatgctaataacatatgctagagaggaggttaagcatataggatcgcataaattcaggttcaatgacgagattttggatttaagtcgagatgtgtacgttaattggcaaatataaaattctttagaaacataaatagagttgctgctcctgataaccaatctagggctaataataattttaaaaacccacagaaattatttaaaaagtactccctacttaaattaaaaaagatgaaccaagataatacaaacacacagtcgattggatataccactcaggactaccctaaccctggcacaaatccaaacttatgtctacacaattagtataaaaattattattgatagttattcaaattttaactcagcattatgattttttagttctacgaagtcgcatgtatgtgatcctgatggaatcctaactgaggaggagcagagaaatatgaaccgcaaactgtcggactcagacttggacgtaaattaatagaatttattataatttttagatttttgtaaccctttcgcagaacatattcgtagaaacgggtgtttcaaaatctgatgcccaaacttcatttgccaataaaattttaaagtattgatgacttttaattattttcaaaaatttttaggaaatattctgaaacattccattgcgattacaacaagtcgatactcctcagttacgtcaaagtatgtttaaagtttgatattatgtttaggagtttgaaacacttaaaatcgtttccggaggtatttttacaaatattttatcaaactgaaataaataaatcatttagaggacatgattggtaagaaaatcaagccggtgtgttaatatttttattataaactgtgaattaggaactcatttctaaacttgaggaggaattccaagtgaaccagaaagagctttacaagtcgcttaacgttgtcatagaaaagataatcgaaaggataatcaaaactgatttaagtaattcatacataggattccttcaattataaacacaaataaattatttacacttaaatttatatacactaaaaaattattaaaaacaatattaaagataaattgattaataattaatttagttttcacggtgttaattaccactattgttgttgctattctggttatcggggggttattcattttctataattgacataatttactattcgttgaaatattttttatccaaattagtaactaattttcattttcaattttttgtttatttctttacttttggggttaattgatttgtttaaattatggttttatttattatttccaagtaatttttcctttattttttttcacaagtcttttttccttaaagatttatctcaatactatatcttttgttgtattccttatttgttaaagtagttccattatgataacattttctaagaatatccttgggaagttcattcctaagaacttattctcatcctcacgactcttttcaacctttactcctaaagggccaactaaggaaatgaacatgtgtacagcaatcaacgacgccatgcacatctccatggccgaagatcccacgtaattctctaacacattacatattttaccattatatttactatatttaccattatatttaccattatatttaccattatatttaccattatatttcacttttatattcacactttaattgtattgagatgaataaattgtgtagtacttgtgtgtttggtgaagatgttgcctttggaggagtcttcagatgttcagttggtcttttggatagattcggtgaaggtcgtgttttcaatactccaatagctgaaaatgtacacaacttattccacactattcacactattataatgtaatcgtgttaattgttattttagggcattgtagcatttgggattggtatggcagctcttggacacaatgcaattgctgagattcaatttgctgattacatattcccagctttcgatcaggtacttataaccactattatattatatatcaacttgttaccagtttaacgagcataatttagattgtgaatgaggctgcaaagtttagatacagatcaggtggtgcttgggatgttggaaagcttactataagatcaacttggggtgctgttggtcatggagggttgtaccactctcagtcacctgaatctcaatttgctcatgcagctgggcttaagatagttgttcccagaggcgcttatcaagctaagggtttattactgagttgtatcagagaccctaaccctgtcattttctttgaacccaagatgctctacaggcaaagtgtagaccaggttccagttgaagattaccaaatcgagttatcaaaagctgaagtgctaaaagaaggcaaagacgtatctttacactgttttacatatttttatatatttttaaaaattttaaatctgtttaatgttgtgtttaggtgacaatggttgggtatggtacttcagtgggtttgatgttgaaggcagccaagctggctgaggaggaacatggcctcagtgttgaggttattgacctccaaactgtattcccctgggatgttgacactgtagaacgctcggttaacaaaacgaaaaaactcatagtaactcacgaggctcccgtatgttctaccacactattactctattcctatactatatttattcctacactatttattccttactatatttattgtgtactatatttatcatgtactaatttacacaatcggataatgtaatgttttagaaaacgcttggaatgggttctgaaatagccgcaacaattactgaaagatgtttttacaagttagaagcaccagtaaaaagagtgtgtggctacgatactcctttccctctggtctatgaaaagtactaccttcctgaccagtacaagttactggaggctgccatccaaatctgtaaataacggaaattttctatatatattaagaaactctcatttaattgtttaaacttaaaataaattagtttaattttattactacaccatttactatataatatttcactacacctatagttatatacatgtgtgtatattgtgtatagtgtttaagtatactggttatactagaatattgggtatattagaagattaaacgtatttcaactgctgtgactcaaacaacttaactaattcgtcgagagaaaccacattttgttcatcggagtctctaggtcttaaggaaacagttctggtttcaacttcacgatcgccaacaatgcccatgtagttccacctctgctgctggccaaacttgatcttcttattaattgtgttattagacctgtcaacatcaacattgtaccctaaaccatgtattatcggaaatcagtaattatactatttatttattacctagagcgttgaatttttcatataattccagtgcgtaatcaagatgactgtcagttattgggatgaataataactggttgggtgatagccaaaacggtaatttccctttagtttgttcaaggacaattgctacaaagcgttcaattgagccgaaaattgctctatggattatcacaggcctgttaaatccacatctcacattctccgcggaactctcacctaacaccttattaaccacattactagtgttaaatatttatttgatcaatagataattatttttaaaattattgtattgttaacatacttttatctctgtattcgaggttgaatctgatgggtagattaaagtccagttgtattgttccacattgatgctctctatctaaacagtcaaacagcaccacatcaattttgggtccgtaaaatgctccatctccaggattcaatatcctaaacaatattatgtcacatttttatagattttttgaatgcattcgtatggtctattgatagtgttattgtggtaccatttggctccagttttgttaagagcttcttccagtgatttttctgcaacctcccacagttcattatcacctaaaccatggtagtttaagtccaatttaattagttaaatctaatattaatgtgttacccagagcttttgctggttttgttgatagtttaaactcatatctgaaatcgaaaagagagtacactttcccaataaatgtgaggatattaagcacttcctccataatctgttccctggtacagaaaatgtgtgcgtcatcctgctgaaatcttctcaccctaatgaataataaggtaaatctctctcaaatatatcattatatggtttacctggtaagccccgatagtgaccctgtaagttcatttcggtgcagaaccccaaaatcagcaagtctcagtggcagttgtttatatgataagaagaggtgtttgaacataagacagtgtcctggacagttcatcggcttcattccccactcagtatcctccagattaaacaagtacatgttctcctaccaaataattcatttgaatggggataacttttatatataattgttaaacatataattgctaaaaatataattgttaaatatgtaattgctgaaaatgtaatttccatgaaagataccttgtagttatcgtagtggcctgattgtttccagagatcacatgagaagatgtttggagttatgacttcttggtaccctctaattctgtaattatcctaaaatcatatgaataatctgaaaaatactctcatgaattcaaccagtctgttataaatctttgctccatttggtaaccagaaacatgagcctaatgacaagttaatacaaaattcgtgtgtaaaattaaatgttattacctggtgaatggaccgtatcaaaatagaaaagcttcaagtctgttccaatagttctgtgatctctttgtttggcttcttcaattctatgcttgtacattttcagttgttccttttctgggaatgatattccgtacactctctgtagagtatcggactttgcatttgatagccagtatgatgatgagatcttggtcacatcaaatgagtttgctctaaccattgaggttgtcgggatgtgcggtcctctgcaaagatccacaaaatctccacatctgtaacacactgtgttttccccgtctgggaccttgttcttaataagctgaaccttgaacgggttatacttcatgagctccagcgcttcttctttagtacacactagcctctcaaatgggctattcaaattagtcaaagcttcaacatgacttaacaaaggctttacatcttcaggtttaacactctaaacaacaaattaccaactgtattaaatttgtataataatttatagtacaaataatatgttatgattgtaaaagtacattgtttccgaggtaaacgtcatagtaaaaccctgaggacaatgctgggcctatagtcaaaaaaccaccaaaacaagtttccaatgcacttcctacacatttaatgtgtaaatgcgtgttaattacctagaatgtgggctgatgaatgccagtatacgtgttgtccttgttctgagttaaaatccaaaaattcaaccttgcaggagtcctcaaatggtctatgcatatcccaaaggacccattctgaggttgaattctccgagttatcctcatccacatccgcaaaactctcagataatttgttttcatacaacacctaaaaatttattaacaattatatcaacaaataacaatgttagtgttaattatgttacctttgctactacggccttcttcgctcttttcttgtcaagcgcgtatagaacattgtaaggagttgtaaggaatgattttccggatagtgatacttcgccgtcatctgtaaccaggaccaaagatatatccaaattctcacgctctaaacgttaataaagttaaataaattaaacgacataatttattaggtaaatataactaatatatttcgacaattaccttttagtttttgttgttgtttctgatatagagtgttaaatagttctaatctgtccttgataaatttagggttcgtttgtagattgaaggaattgtgatccttgacaaccttttcagaacaactatcagataaattaggatcatttcccattttataatgacttaacaatgcacttgatgtgatatagaatttggaatctaggtgatttttatgaataaaaggataacgaaatcgcgctaaaccaggtaatataaaatttaaaaataccaaatgagtatgacaaacacctcaacaattttatatctaaatatggagaaaaggtggaaaaaatggttaaagaaagataaacatttaaaaaactgaaccttttactttcaaatattttacagacgagaatcaaagcacagatgaatagaattatttctgaaatcagcataaactgaagataaaaaatttcataaaactcttgacatcaaatgtaagttaaaaagatctaagaataattaaatctatcaatgtagtgtatatattacagtgaaaattacagcagcacataaccttcttccttcttttcgcttattttatactctgataattggtgtatgaatgagtcaagttttgagtatttcattagaattgatggatccttaaacacctacgccttgttagtggattcctactcacctcgatgatatcttcatcagttttaagtttatttaatacattttctgaacagcaaatacacatttccgaaggttcagcataaagttctgaacatttgtagtctaaatttatattttatttatttttaaacatacctgagagtgagaaccttattgagtgaggtgttttccctatacaagtcttatcaccgtgatctgccgcaaacatcttctcatgctgagttaatgaaactatcaactccaccaccattgaggcacagatatctgttatcccagccttcactactgtacacgtttcatcaaacggtctacccattatattacagagttgtttttagtttattggttaaaattgttatatattgagaataccgtcctgtaatagtatctattggcgcttgagattcactgcagaagtaacatgaccctttgaattccttataactgtgccttactatcataaatgagtcaaatcccagcccagctgataccaccagtggacacttctcacccctcatgttcctacaatattaatattatactagtaggttatattaattatttgagtataatgctaaaaggtatgatatgagtacatttgtgaagatatgagtgatggaagccatctggactccttggaatcagttgccagaacaataacatcagatgatgcgacaatcgccttggtgttttggagctgtttattcaaataattatcgcaataagtgtgccctaaaccccaatacgatcattgctcattacctatcattggtatttcagtgttaacaatcgtaagcttgcaatctggcttaatcttgaaaatcattctttcagcggcatccacctttggagtctaaagtaataataaccaccaaaataacagtctaagtataaataaataatcacattggtatagcagtatttatgtgtgtataaagactgtcttgtagaatttgtcacgaatccactatcaaccaacacaaaagtcctaaaaaatattataaatatatatttattactctacgccccaggccaatagctgccgaacgaggctgcatcctagtgttcctagtcccactatgcatactttcaggtgtaatattttatctaggtttaactctggtaatattctccatgttattaactccaaatttaacttctcgttatctacatgatccataaatgagtattggtactcgtaacttaaagacccctttgagatatggtaactaaaactgtagaccagtgataaatccctaaaatcatcctcagatggtgtttgaatacagtataccaatgcttgggagtatatttcatctgtttcaaaaagtttagaattaactataaccaagtttaagttttccccgaaaatcctattttcaatgcaaaaagatagtaaaaagttacgccaaaactttggaatgtacttatccccgttaaaagatgagtatgaacatatgtatacagaatccagaggaacggtctcaccgtttaaactcacattaattccgtcatacaggaactcattggttctaaacaccctactgtgcattctactgtagatgaagaacaagtcactcagtgtgttggacttaaagtgtatcagaatcgcgttcagatctgataacttaaagttattataactttgcatatacgtcgtattgtttactataccaaagtatgaataggggaatgggcacttggtagttaccacggggtcagctatgtagtagtatcctgaacggcttttcaagtccataaaacagaatataaagaaatggttaactttataatagtattcttcaaaccctgagccgatcgctttgaaaatgtgtgaggataccagtggagtatctggtgttatggaatccaggtcaaaatggctggaaatgaagctttttttatcatattttctcaattctaatagagaatcaaatactactaaagttccttgtacaaatctacatgtacaatgttcgtttttatatgtgttttctgtatttttactcaataattccttttcgagattatacctcacgaattcagccagtggctgttcctttttttcaccaaatctgcaatcatttaagtcaaacgagtgtttatctatcagaaatgtcccatctactgttactagtgattttattgagagattatttactccctgtttaagcttcctgagctttatatgatacaattcttcgaaaaatgaagaatctattttataaacctgtggtttaaaaattaacacattttcgtccatttatatagtacatatttaaacaaatataaaataattatcaacagattaatgtttgctttaatcattgttgtgttgttgtgaacatagttaggaaatctcgctctgttaatgtgaatattttctgagattccaacaatctctcaagataaacattagtgtgtattgttgtatcaactattgagtctgtattgttaaattcttcaggtgttatgttaatgtaatatgagatcgggtgtgtagaatcaacaaattcttccatgcaatcattatcaaactcctccacaagacttttaaactttgttacaaatatcctaaggtgactgttttcatattctatttccatatcttcagattctaaatttgattcctctgatgaaattgacatttcttcggacttactactttcgtctgatttactactcatttcatcagattcgggattaaattcactagcattatgataattttcatgcgtatcactttctaattcaaaattattaatatccacctgatctgatgttaggaaggtgtgaagcttattcattgaactgtagagttttttaatccataaacagtacttgactgagtttaataatttatcgtctagttctaaattagccccgaatttgagagtttcaattgttattaaaattaaatttgagacaatctcatctgacctcattccttcctttatatcgttaattatgttatcacatttatctatcatttctaaacaggagttgtggatctcttgcaaatttctaaaaatttgccaatttttaactctaaggttccaaaactcgttaaacaagtcaactatctcctgaaatccaactttatctctaaccacttcactaccactagatgtgggtttatcctgggttctatcctcgtcttcttctagagaatcagatgacctatcttcagatggtaattttttcatccttttagtcgatctcctacgcttaattctgggttttatcattatttcctcttcctcattctcttcgaaaagagtattatttactgttgaatcattcggattatctggattcacggtggtttcacgagttttgtataaattcaccaggttaattaaatcttctaggtcctttttattaacacttgcattctttctaaagtttgttaaagcatgccattcagttttgaatttgatgaaatcgttggtgattgaccaattattaaatctgtttaagacgtttctgcatttcttttcaaacttgagtgagttctcgacatcagccttgatcggctctaacaaattatgtatatcgatatactcctttagggtttctgcttgttggagcaggacaagacattctattgtacagttggaagtattttctgacgaaatcaacgactccaccttcttatgtctcctttgaaatcttttccacattaaatatgccggctcaatggccttatagatagggataattaaattaatttcctggtaattattatgtatatcctccaattcctccggttttaactttttattcctatcaattccattcttatcctcaagccttaactcttcctcatcaatgctctcatcttcagaatcgctttctttatctatgtgatttttatccttactctggttattcattcttaaatcctcacttgacattaaatatttatatttcggctcctttaatctctcaattagtttaaaagccttatttagtttattatttaaatgttggtacagtgtgtgtgtccttagttcatctggtgtgttctcaattaactcgcccacaagtttatagtttactggcttctgtgagtatttctgtgcattgtttagccagacgatcttggatagatgggcttttacattttctaagtccggtatcttgatcactgaattgtcacattcctctatcaatatgttcgaatttgaaatatctgaacgcagtattgactcgtccaacagattcctgagtgatgatacgctgtagaaaagatgacttagagatataaactctgtagtggcaaatgtcagaagtgacccttccttcaataaattttctgcaagtgacaagtctatggaactgctttcttcagattccttatcaaagataaaggccaacttctctcgaaccttactagaatactcttcagccaatctaatctcattctcaagcctatttgagagttcagaattcaacagtccaaatgttatgtacctataatcgttaactaatactcttgcttcagttaatgttagacggttagaacctgttctagccaatgagtcagtaaccaaatcattccagtagtcaagctccttaacaaaagttgccaaggctgaaaaaagtcttctaacgcatttttcctttaccacaaactcttttgatgatgattcgcttgatacagaactcggatttatctcaattgaatcagttggcgatccagccaattctggctcagctgtttgttcaggtgttttgacgtcaattttagatatcttcaatgaatcatcactagaagtgtaatcagtaagtgaatgttctgacattgttggcatgtaagcgtcctcattaattatggatttaaacattgacttgactagatgcggtacaatagagacccagggcacagaaataagttccttcgaatctaggattttgttaaattcgttatgatcaaaagattctacatagtctgatttagcactttctgtgtttgtacatgtggaatcatcagcgctagaactggattccgaacaaggaatttctctagttacctcctcctataaaataatatttaaaggattaaaattaccgatttcgtaatactatagtttagtagcgattctcttgaaatgttattgaatacagatttatatttatcatataatttcgtgtgtattaaataattttcatcagttcgtgattctaaattattcactaggggatcgaataccttaacatatctatctgaaattggtggaatctgcggtttcctgaaaattggtgatactagagcctgacgtgatagtacatccacctttatactgtgccctttcttcatgtaaggatgtacatgagcgaatggagcatgggtctccatattttaacacaattttatacatatatggttaaaacattagttatttaatttaaaatattatcatatttaataaaaattcattaatgttaataattgttaaaccaaaaaccctccaactttaatctacacatacttctcgatttctcattattatttatttattacttctaaatcatgtttttgagctttaaaccttaaactttataacatattgaagagttttttaaaaatagttgaagtttatctttaaacttgaatataaaaacttaaagttcattcaccgtttgaacacttgatgaagattgtaatgtgctatgaccatctcgagtggcacggtcttgagttctttgtagagcttcttgtctttgagctacatcacttgatgacaaacctccggctaattcgtcagctttcaattctcttacatagacctgtacttcgggcttacctttaacggtagttgtagtaggattagagtctgtattagggggtgaactttccagctccagatggcttgatccattagatccaggggatcttggcccttgaggaccagaaggttcttgttgtccgtggcgacctggaggtggcggctcttgttcacctgtagaaagggtttgaccggatgctaattttaattttttggattttttcaaatcttcgtatccagaaatctcacggccgtttcggtcataaactttaacgtgaccgaatttacatcctataaaagtactcgacatagagtaaagctttgtaagtccaacggcaccagaagttacactaaaggctgtgatttcatcagtgactataaagaatatcgataattttccatcgtttttgattgttttcttgacgtaaacagagtctccagagtttttgtggaaaaacacgctctttgatccgtcgttaagggtaaacgaaagacactctccggcttcaactctgctaccgtccggtacgtttttgataactagagttatgacactgctcttagttactgttacttctggaacacaagttttctcgtgattaacgtagtaaccttgtgggcaaatacacttgtaatcatcgacacccgggcctgttggaacacatatagtgttctgaacagttccgcacttggaagttctgtcatctccacacggattcttgtaacacattactccatttccctcgtagttatccttgcaaacacatcttttcagttccttagtgtttgtggtagatttacaaaccgccaaaggacttgaacagtcatcattagtagagcaatgttgaaaacattctttgtacggattaccaaagaaaccagattgacatgaacaaacacacttgtcatcggcagcattaaagcagaatgcaaagtctttgcaaacattgggagaatctttttttgtagaccaagtttgccttaacaacttgcaataatccttagtgaatggcgtttgtaaggctgggtttagaaatttggaattttcaagtactgtagtggcatttgttgaaggaagtgggtagtagcccataacatctttattaagtctacatgttaaatcgtaatcagtatgttgattccatggacaatagagcttagctttattatctgacttgatgagcactagaggaaagagggtgtagaaaaatccgtgaaccgatagtaaattgagtgataaaagaataaacaatttcatatttgctttataatttaattttcaggcactggttaagcacaaggagcctctaaaaaagaagatgtgtaagatacctgaaattttaatacgatccgtcaaaaagtataaaaatatccaaagtctagatcaaatattaaaatacacaaattaatagacaataatatttatcaaatcaaaactataaataaatcattctcatgtgtaaatattaaaatgaatcaattttgtatttttgtgacccaatatcggctactggcatacacatcgtagaacgtcgtagatcaaaaaaatcgcgttttctatattaaattaaattataaattctataaatttaacatgtatatttatgttattaaaatttcatttccaccttttaatgttcttaaatctcgacctgtcattcgggcttcttggtggatgtaccttctttttccctctagaaccttttttatgcttatcctgttcttcaatgaatggatttatagctattttacaatattttttatccccagcaaactgtgtaaggaaatctaaaacctgtgacctggttgcatctgagtactccgacttaaacgctatgtattccggcccaaatttatcattaaacctgaaaactttatcctttgagtatatgtaaatgaatgaattgacggtgttgagatcctttataaagtccaagtcatgagtcgctatcatgaaaccgcccttgtaaattccgttcacaatgagcttcatgagcttcttcatgaataagtcaagatggttcgttggctcatccatcagtaaaaagtgggccttgttaatgagtaataaggatagaaggagtcttgacctttcaccaaatgacagtgttgaaactgacgaattcgcgtaatctgctaaatgaaaacatcccaagtactctgcaagcgcatcttgctcaacttcattccctacgtaatctctaagaaggttatacactgttttattgtagtttagaatatttgaacagttttgcgagtagtaagataatttcgcatcattaacactcatcaatccgtccaccaaagtgaagttaaatggttcatttactaatatccgatactctatgtcatctgcatcatatactgactcctcagagtttgtcatttctctgttcaccttgtttatctcctcaaacaacttccaatccctatccattctacccatttccatatccatacccctgtttacaacatctagataatccgttatggactggtagagtaatttcttctctatactgctaatctgggcgagcagtgggttatttctaaaagttgcctgagatttaaaaagcagtttcaagagtgttgtctttccaataccattttcacctagtagaactatgcgatcggaaggatggattgtcaaattcaggttatcaaaaattctcttgccagtgtgtgtatccagggtaatgttaattagcttgaataaaggcccaaaactgttaagcatctggcctgtattcaatagtgggtttttccttaatattttctggaatatcatattgaaagtggtttcgtaattaacattttcatttgattttgatctgtggtcgtcgtttattttgaagagtactctattgtaagttttagtgtactttgaaattggtgtaccaattagttcatcaagttcctcctgatattcgtccaataaatcctgcttttgagaaattgtaaccctcagtgcacttagtgatcctttcttactttttttcaactcttgaatatctctggttagtacattgatattcttcctcagtttctctattcttgcgtttttcatgttcttttcattcgttcccttttgtacaaaatcatcaaagtttcctaaacattaatataccaaatgtaaatgatattaataacgtatgaaattacctttgaatggcgctatagtaccatcacctggcatttgtagaattgaggtacaaattgtgttcagaagtaccgtatcgtggcttacaaccagtactgacagggtcgagttcttcatcaagtatttcaatacgtctataagaaattttacggtggttgtatccaggttatttgtcggctcgtcaagtaatagcaggctgggtgaatgtaatagtagaatgaataggtataacctcatcttaaaccctccactgagagtgttaactgttgatcctatcaccgactccattccaaatattgaaaccagtttcttaatcagaaacttcatttctctaaacttttgtgttattaaatccctttcactgttatacagggataaaatatcacccgcgatcttgctaggcgtttcatcactatacatactttttttcgaaggtttgtgtaacatcaacgtgttaaacaagtttaggttcctctcaatataattcattacgttgttacacaggttataagattcaaatacatttgatatgaggtcagacactgtagattctgggttcaagtccaaggtgtagttttgtctcatgtaacctacgcctgagaggttatagcctgcaaatactgggttattttcatcttcagaatattcaaagttgttgtacactgcggtaaattgtttctcgtccaggttctcatgttccataagcttagatacgagagcatatagatattggttatttgagatattattggccgttgcctcatccttgatatgaaatttaacgtccattgaaactgacatttgaggtttcttaaacctactatttctactggttgatgaatttgtcgagagtcgttcataaatggagtcaaacatcgaagattttccgacgccattgtttcctatgattcctacacactcaccggtgttaactgagaatgagatattgtcaaataaaatacgttcgccaagccaaatggatgcatcttttacttctaaaagaactcctggtttagaacgacctttaaatgaatacaaatcattaaaatttacatcaaaatgtgcagaagatgccaagttatcttggtctttagtaagaatccactccttagtctcagttaacacatcctcagtgggtgctaaatttagtctatgataagtaactggaacgatgttggaggattcatgaccacaaccctttgtaatggtatgatttgagttaaaattaatagaaggtcgagaatcgtgtgagcgaaaacaataaatgtgaaatttataaaaagttaggtacaaataaagtatgatacaatgtgttaaatgaagaaataacttcataatactggaacattaagatttcagacataatttataaagttgcgataaaatacaacaaacgagaattaaaaattaatgtaattttaaaatgtatataataagaatttagaagaataaatatgcgtaaattaaaattttattaataaaaaaacattctaataatctaagcattctaagaaaatatgatataaattgtaataaataaattagttagtggaagattaatatttattaggttatgtgtaggatttattactcttgtaaagaaagttttaagtaacaattccatataaacatatttattaaaatatttatatatcaggaattttagttagttttaatctggaataaacttattatcttgattttacaatgcctgacgtgaattaaccacacatgagaagtttatgaatttatatttggccttccgggaacattgtatttataaactatgttagggatttgagatgaggtcattttatgattttactggaatttatttccgttctttcattaaccgcaagattaatttgtcaaacacaaaaattcaggaaccgtttttttcaataaaagtaaaacatattgattattatttttaatttattttatcttattcaacgatttttagggtaaaactgatctttgtaatcgcaacttcagcaccggtaaaaattttgactttacaagtacctggaagaactatagggaatcttcgcgtaaattgctatcttcatcctcttctccctctaaatactcatatgatcctaactcactgacgaccctcccgagaccttatgaatcccatttgaaggaagacgttaaatttcgtaactgtttgggtctaaatcctctatttacacattatgtgaaccccgtgtccatcgttaaattcacagccaaatacctcctaagctaccgattcttcttcatttatatggccaggacaacgtttcaagtataaccataagtaattatatattcacttttaattgggattaacaacttttaggccgcgcgacctttgttagcgttttgtgtttttggtgagattatgaagttggttctggcaaacttgagtggaggactgcccgcatatttattctcgttcgttttggcgtttgaagttttctacttcttcctacagctgtatatttcctacactttcctcatgatgttcttcactgtcatgttctaaacttttggcaaagatttattgagattaaaaattaaaaatgacaaggaaattggtcgaggagacagtgttgaagttggagaacttgaaggttggaataggagtgttgaagcggttttatgcctgcacaaacggagtcttgacgactttcagactctcgtttaactacacaaataataagccgaaaacgatctttgtgtcctctatcactacggttaagatttcaaacagctttttcaaggagtatataatgcttcagtgcgggtcaatcaggtactttatgtcctgttcagataattcaaagttatactctgagctattgagagtagttaagcttaacgagacatcgacggtgctaaactccccaagaacggtggaaaagagtgttgagtcacctgattcaagatcattatcagttccaggaatctcaagggttttaaaaattcagcaggagaaaattgaggaatctgaagacctttgctcagcaactactgaactccatgccttgaagaataaatgtaaattggttaaagatgttctagttaaagttacaaagtatgaccaggaagggtttaactcaacaattgacaaggtttttaagactcttggagttgacatctttagccagtccaatgataatgaagatggctcagatactcctacaaacacagaagaagtgttaaaccaactaaggaaagtattatcgttacttttaagtaaaaacgagtctattttgctacacgagttttatgtagcagctaataggcttatgttagcagacttgttatctccgtcacagcttgtgaagtacgttaataaacttgaaaacgatggcttatgtaagttaaacaaggtaggaaatgtgtatcttttatcaaaaagccacgaatcaattagtgaagaggagttttgcaacgatctcgttagaattttaaattgtggaccaacagatttaatgaagtattcaaaagaagcaaacatatcaacaagcctggcacaagttaagcttaacattgctgagaaaatgggattaattgtaagggatgaaacaatacaaatgacgaattattataaaaatttatttaataaaatgtattaaaagttttatatgtaataatgtgttaaagtgtgaattaaaattattagttacaatttttagaacattttagattattaaggtggtctttgacctgctcaatttggtatttctttctacgaatcacaagtttattctcctctacagcgtcaaaaagctcctgatcaaaggattcctaagaaagataaattcacaaagggtttacctgtagagatttattaataaagtcattagattcctctaaaaataataaaattaatcttagatacctaatttagaaacagcacgttcaagttcaagtagaatgtcgtcacataaatttggattatttggtaaatccagattccagttgagagttaattgcgattccaagtcagaatttcttctgttatttatatacacttctaccatacacaataatagtaaattgttaaaaattaataatttgtaaataatattataatggtcattaacccaagatcattaacaatttgttatcataattaatattttataataaaattttaatttataaaaatttataatagcttgtattatgtcggaactttatgacagaatatcaaatgaaagggtttactgggataaaaagtcatgttcaagtattgaggaatggaaggaaaaaatcgcaaactcctcaactgtttatgttggaaatttagctttttcaacacctgaagaacgtattcacgaagtaagataatatttttatactatccttttacttaatttacttaattttattataattatcaataaatatttatattttacatataaattattgtattattcatattatcaaagatattatactaagcatatgatttttatttgattaaatgtatttaataggtgttacaagcggcaggagagatcgataggatagttttggggcttaacagtataaagaagagcccatgtggattcgcttttgttgtatataaagatgctaaatctgctaaaagagcagttaagatgttcaagggttgcataatagatgggagagtaataagagtagatgccgacccggggactagtatcgatgatactagaagactagcaagaggattaaacggataccagtggcgtgatgcttttagaaaggagtttgacaccagtagaggaggtcaaggcctaggagttagccatgaaattttaaataaaagaatgaaagttccacaaatgatgtcatcaatactggcagatcagtccagagttttaaacccttaatttcatttcatttacatttatattttacacatcaacataatatataaaatggagtaataataaaataaaatagtaggataataaataaaataacaaaaattaaataaactattttaaggtgctaataatactaggaaatatctgaaatagaaaataatataataggagaatatttaaaaacaatgttaaaatttgtgataaaatagaaaattaatgttttaatagagcaaacaaggtagttgtatacttgattaggcatggggttagatacttcacaagatttatagaataaaaagtatataatatttatatttgtttaaggaatcccactaataatatttggattaaaatccggtcatagttattataagtggaccctacataaccttttagttatatccagttttaataaacataattaaacaaacctaaatcgtaatggtattttttacttatcatatctttgttatgttaatattattttatttattcaaggttataataaatttataggagaagttaagagtttttgaattgagagagaagtcagatgcagagctcttgaagctcctggatgatctaaagcaggagcttgcaacattcagagtctcaaaagtaactgcaactggaacctctaaactctcaaaaattactctagttcgcaaggcagtggcaaaggtattgacagtttataaccagagaaagaaagaagaggcaagaaaaaagtataaaaaactgtcaaaaacgccacttaacctgagaccaaaacttacaagagctaaacgtaaagctttaacaacaaagcagctgaccatgaagacaattaaggaacgtaaaagggcagaaaacctaccaaaacgtaagtatgctcttttggtctaaaccttcttaatttactaagacacatttattatgtattatttgttctgtttctatttgatatttcttgttttaatttcagttggtcggccagactccatttcccataattattggatctaggattccatattcactatttattttcattgtacataattgctttcataatattcaactgtagtgtgttttttacaattctttaaacgattcaaaatggattgtcttctttcttctaaattaggactcaatgatgtcgctgacaaggtaattatatacaatattcacttgaaacagtttatgatccattatttatcattgttttatatatttaatttagaatagtgattatctatagttttttatttatagtatactgggtatttaatacataaacattttgatattttttgatttgtgtatagttgcctggtaaaagggtactgatgagagtcgattacaacgtaccaatgagagatggagttattaaggatcttacaagagtaaaggcaactattccaactatcaagtttttacttgaaaatggagttcactccgttgttttgatgtcacattgtggcagaccaaacggaaggaaagtaccaaggcactcactgtgcccagttgttggaccgctgtcatcacttcttggtatgcaggttaaatttctaaatgactgtgttggaccggaagtggaaaaagagtgtagcaacccaactaaaggctctgtaattcttctagaaaacctcaggttccaccctgaagaggagggagaattggatggagctaaggtagatgatgttagggtccaaaggttccgtgagtcacttaccaagttgggtgatgtgtacgtaaacgacgcatttggtacagcacacagagcccatagctcaatggtaggagttaacctacctttaagagtggcagggttcttgatgaagaaggagttggactactttgcaaaggcacttgaaaaccctcagaagcctttcctagcaatactaggaggagcgaaggtaaaggataaggtcaaactcatcttagcattactggaaaagattgatgtcctcataataggaggaggaatggcatatacctttaagaaagtacttgacaatatgccaattggaacctcactctttgacagtgatagtgtccacttggtcaaggaaatttcagaaaaagccaaggaaaaaggtgtaaaactactccttccctgtgattttgtagttacaacaactttttcgaacgatggaccgataaaattggcatcggaaacgcaaggagtaccagatggttggatgggcctggactgtgggccgaaatcagtagaaaaattctcagagccagttttaacagcaaagacaatagtatggaacggcccacttggagttttcgagttaccaaacttctcaaagggaagtaacgaagttctagatctggttgtgaaggcaactgaaaagggcgctacgtcgatcatcggaggtggtgacacagcttcattagcagaatctactggaaaagctcccaaattaagccatgtttctacgggcggaggagcgtcactggaactcctggaaggaaaacaactaccaggggttgtatatctaactaatcgttaactgtaatgtgggtgcaatacataatattcttttaattttaacctcaaattattttacattaactatttatgtgatgatacacacaaatttataaattgaaccatatattgtgggcaatatatttacacataaaattatatcatgtttatatagatataatatcgaatagatatataggtttccaaagaatagaaattagttagggtggtaaataaggattctaaagcgtatagtgtgtaaattaaaacacattacattgtcatattgaataaaaattgatattaatgttggaaaaatgaaatttaaaagatttttaatgggaatattagctagaacaaatgatttcaattaataatttagcccacactgattttttatttattaattaacacattattagatctttttgaatccaccccaagtatacaatgagactaaatagatatattaatcgaatattatatgagatatcaccaatgtgagatttatttcgaagattaatgtaaaagtaatctaattaaatttgtgattaagtttcagtggatgttttgaaaaatcatgttttaattttgtgtgaatcaggattattgtaatcactgtcactgagcaaaatatagcgtataacagtatatatactgttttcaaacattgataatatcattttattatattttatcaaataattaaggaatttgtttcatataaaaggtcattcaaaagacgagcaagatctaaactaaaatcagaagacaaactcagaaatactggatcgatttatttttatatatgatgaaacaccatattctaaaggaaaggtaaaataattaatcaactacacacatttggtaacaccagtaatatatgagagagtgtggacaaggaaggttcatgaaaatttaagtatatcgtagaaaggttagatagcttgaatagcttaaacaatcgaaccaatattctcatattgttttgtttctggtatatcaggaaatgaaaacattattaatttatatttacataatcaaggtactagcatattccggaagatttgccgtatatgacataaagggcattttcaacgcgtttcaatacattttgaggaaaaaagaagacaattccctaggtagcactattcttcatgttaaaaaaagtaatgaattatgtggaattatgtgcgaggatgagttattatggaggaaggaacgtaaaaaggaagagtgccaagatgtggtagttacaaaacatcaggggaaggccaaacttctaattcttcagatacagcacttcaagagattttatactgtcgttagattaaggcactttttaggtgtatgggtacccgtaagtaaaggattatacaataaaattgataaaattgtatctggaaggttagattacaacgacacagaaactaaattagagctaacagaagaatttgatcaaatcaaatattttgtgagcaattttcgggtcgatgatgaaaaaagaaccaggatatatactagatcagggtttaaaataaccaaggttacctacggcgatactttggtatgggaaaaaaatgactatcaagaggaagtcatccaaatagaaattgtcaaaacaaattccaatatacaacgtttttacataaggtacgaaacttattacggaacagctgatactgttttttttatatgtgaccctcaaccaaatcaagtcaatagaaaagattatttcttggatgatgacgacgacgatgacgatagtgatgatgatgatttccctggaggagatgggagactcattggacctacaggaacaggactttcaaggccaactggaacattaccagcgccttcgggtcaaacaagtcaaaccggatcatttcatattgctatagggtcgacgagttccagaccaacaagccctattaattttggtcaaaagcaactcgttccattgccaactgacgcaaggccgccgactccaataccggaacctccaaaactgcaagcacctgtgccaccagaccattttcctaagggcattcttcatcgcgttgaaatggacaatgcacatattccgttgtcgggtacaccatctgttggtaggggtgctctagctaagaagatccgggctactaaaacagctgttcctgaagtggttactacagcacaatctgctccaactcattatgttccaggccaacctctttatacaccagctggaactactcaaccaattcaaggaccactaccaccgacgcagcaaattcaagggacacaagttccatatcaacaaattcaattacaaccagtgccaggtcaaccaattgtaagaattccgggacaacaacaacctcagacaattcaattacagccattgccaggtcaaccagttgtaagagttcctggacaacaacaacctcagatagttcaattacaaccattggcaggtcaaccaattgtaagaattccgggacaacaacaacaacctcaggcagttcaaggaatacaagttccaggtcaacaaattgtaagagttccacttcaacaaattcctggtcagccaattctgagaatgccggcacaacaaccaactcagccagttcagagaccgcaagttccaggtcagggaattataagattacaagttccacatcaacaaactcagatatttcatggaatacaaattccaggtcaaccaattcaattacaaccagtgacaggtcaaccaattgtaagagttcctggacaacaacaacctcagatagttcaattacaaccattggccggtcaaccaattgtaagaattccgggacaacaacaacaacctcaggcagttcaacggccacaagtgcaaggtcagccagttgtaagggttcctggtcaacaacaacctcagatagttcaaggaatacaagtgccaggtcagccagttgtaagagttcctggtcaacaacaacctcagatagttcaaggaatacaagtgccaggtcaacaaattcaaatacaacaagttcaagggccacaaattccacttcaacaaattcaattacagccagtgccaggccagccaattgtaagagttcctggtcaacaacaacctcagatagttcaaggaatacaagtgccaggtcaacaaattctattagttccgagacagcaacaaccaactcagccaattctgagaatgccggcacaacccattctcaggccaacaggccagcctcaacatggaattggccctcagagacctagattaggagtgccaagtactttaatacaacctccacctcctagaccatctgggtttacaccttataacataatccagggtatgggagcacaaagattcccaacaggccaggcagtaaacatatcagaacctgtatcgtcatctgacccaacgacgtcaagttcaacaccaggtatcgaagtgcaaccgccaatagtaattgaagacgatagtgattcagaagactcagatgtttttgaaattcatgagagggatggtggtgaagaagttacgacaaccggtacaaatatagatgattatcttgattttttaacccaacaagctacttgttctactacaaaaacatcaagtaaaacgacaacaggctcaaagggagttctcacagttacatcaagtactccaacacagggtcctccattttcttctagtacacagttgaacctgtttgttgatgctgcggtcaatagaccaacagggtttggactatcagaacaaggaccagccagtagtgcgggatcagaaggtacaatatcaatagctggttctgatgactttaatccatcagaaggtcaggaatggatagatatagacaaaattccacaggttgtaacaactgactttagctttgaagaaattgctgagttatctctttctttagcatcttcagttgaaagtggaagtacagggaagacacctgaacaatctccttacgggaaaccagagctttcaagtgttgttgttcgtggtgttcctggtcccagatatcctggtggaagcacggtcaaacgtccgttttacaaggaaagtgctggtacgatcccaggtattagaccaagaatattaacagatactcaaaggattagagccccaatatcaggaccaggtcacactgaatctgaatctagtttggatggttccccgagtaagaaacgaaagagaactgaagatgttccacaacaaccaactagttcagttggtagcacaactgcaggaggaatgggttctcaattaacttaccctgggcaaattccataccaaccaaggcatccaacacaacatcagtatgtaccaagaccaatgggtccaacaccgcctagccaaactccacaaactacaactccacaaggaacagggttttatgggccaacacaacaaactccgggacagtatggacctagtcagaccggccaaactcaacatcctggaactccacaaggaccagttatgtatggcccaatgcaacagggacaacctagaatgacgcaacctggtcaacctccatatcatggaactcctcaaggacaaggtcaacatcaaccaggccaaccaacacaagctcagtatgtaccaagaccaatgggtcctactacggctattcgaacaccacaacctacaactccacaaggaacggggttttatggaccaatgcaacaaggacaacctagaatgactcaaccgtctcaaacggcacatcatcctaatcaacaaactcaacatccttatcctcaaagtacaccaactcaaagtcaaggtacttttatgtcaatgttaaacgaccaaggtacgcattcttcaggtcaacaacaaactccccaacctcaagtacagcaattacaagggtaccatcctcaaaatcaacctaaccaacctccttatcctaatcaacaattacaaggccctcatcctccacctcaacaatcgaatggttatcatggaactggacaaggtggagtgggtcaacctggtcaagttcctcatccttcaccaagtcaacagggacaaagtttttatggaccaatacaacaagggcaacctagaatgacgcaacctggtcaacctccatatactggaactcctcaaggacctggtaattatggaccaaggcatccaacacaacctcagtatgtaccaagaccaatgggtccaacaccgcctagccaaactccacaaactacaactccacaaggaacagggttttatgggccaacacaacaaactccgggacagtatggacctagtcagaccggccaaactccatatcatcctaatcaacaaagtcagccaatgaatacgcaatttagaccaccacaacctgcacaaactcagcatattccaggtcaacaaggacaaggttattatggcccaatgcaacaagcacagcctagaatgagtcaacctggtcaacctccatatcatggaactcctcaaggacctggtaattatggacccaatcaacctgttcaaaatcacccatatcaagcggcatatcatcctggtcaacaaagtcaacaaccaatgcaaacgaatttcagaccaccgcaatatgggcaaactcagcaagctccaggccatccaacacaacctcagaatgtaccaagacaagtgggtcctattcctcctatccgaacacaacatccccaaacccaacaagtaccaggtaattatggaccaatgggacaaggacaatctggaacgggtcagcaaggacagggccagtataatcccaatcaacagggacaaggtccacaacaaccaacacaacaatatagtcattacgcgccgacacaacaacaacaaagtgcacaaaatttatttatatccggtcatactatgacatcactaactggagatacacagggtggaggctggccgcagcaatttcaaggcacacaacaaagtggtataccaggtccagaagatgatgatagtagtgatgaagaatcggatgatgataatttttttgtaacagaacaagcaggaataagttctgacggacaaactccgtcaacacagttcccaaatgttggcacggggccaggtcaatttcctccagttgggccaacgccgtccgttcatcatgcaccaattttcacaccacctgtaggagtaccacagtcaatatatgagactcaacagtctggaggaccacaacaaagtggttcaagccattatgttccagatggaagtaaaaaacaaaaaagaaaggaaaaaccaaggaaaaatgttggtcctggtggttatgcaccagtatatagactgccagttggggatggagatggcggtgatgacgtagatagtgaatgttttgaacttagtgatagtgacgacgacgaaactacaggagccagtaaaaagaaaaaggacaaacatgaagatcaagataaatcagaacgcgttaaaaacatactgagaccatctttactaggtcaagtgagtcaacttcacggaacaactcaagctattggtacacaacagactggaggatcgggttctacaggtccagattctggaaaatcgaaaaaatcgaaacaaacagagaaacagggaacagatcagaatgcattacaaaatattgatccgaaagatgttagacccgatgacgatccatttggtcaatttagaaaagacggattcccactagacttacttgagttggatgatagtaaaaaaaattacgttgtgtatgttgacaatccactgcaagtaccagtcattagaataatcccatcagatgattcgtacattcaggagttaaatttgggcagtttaatcatatggaggagtgaaactgtaaagtgtgtttcagtaagattagttgtcactcaatttttctttggcgctgttgaattaactttagttacgccgatgcggaagaagttccatttgttctttagatacactgatggttactacagaggtgtggcacgtcctaggtttaacgaggctatatacgaacaagcgacaagtgttagagaaatgaaaaagttaagtagacgtatagataaagaaataaaggaagaacaacaagctaaaaaagaagccttggaagaagctggaagacagggacaactagttgaaactgaacaggaagatgatgacggttcggaagacagaagttgggacattcaagaaataatagtaaaagagaatggcaaccacacgaacatcgtcaggggaccaaagaatgtaacccagaggagataattgaataaatagaaaaaactagaaaacaagattagctaataagcatgaaaatttcactcactaaaacattttaaattgccagaatataaaagagtagtgtaaaatattcaaatgtacattaagttaaaatttttaaaaactcgagggaatttccaaggaacttttctggagattttaaaaagatgataaaatcatgtcaaagttataaaattatatgtaaatgagattctggatatgaactagattccccattggattctaatgtcaataaaagctgaaaactagtacacatttaaaatgtgtcagtacaatgcagttcgtttaattataatcttttcgtttttcatgaatatttttgtacataatgagtttggcatctttaagcacgtgttgtattatggagcacctcgttgctttaaagattctatcaagttatttatcttgtttattgttatatcataaatctgcttcagaaaaatggccatcaacaaatgtgtaaagctttttttaattttggttttagtcggtgttgttgcttttggggtcacatttttgccttttaacctatctgacaaatttaaggcagcccttaacaaggtttcaaatcatctcaggggacttggaggctctgattctgatggaaaagtccacctcgatttttccaagcgtgacagttatactcacggcagcttgaacatcgttttggataaactcgacaacgtacctaaggagggttacctgaaattccttcacaagggcgaaaaagacgctcctcttgacgtagaaaaatttactttgggtgatactaacttagagggtcttgaacctggtctccttgactacgctgctggttacttcaagggtgaggacactcaccttctccttgttgaactttgcctccacaataaaggcgatggtaacgttgaaggtgaaaacaataatgccgagggtaataatacggaaaaaggcgcccagggcactaatgacaccaatgctaccaacggtggcaacggtactaacgccgccaaaggtgacaagaccgtagaaaagactgaaggtgagaaagttttctacgctccaggagaaaataacaaatgggtaaagcttcctcctgaagctgaccttggtgctaaggttgatgaagttttcgctactcttactgctaatactccacctgaaaatcaacaaggcacaactcctcccgcagcccctgccggtactgctacaccttcccccgctctacctaaccctgaacttcctccaggtgaaactccagtacctccacctcagaattatcctctcactggccccaaagctccccaagccggtgctcaacttcctgtaccaaatgtcccaggcactcaacaacctgaaggtctaggtgcagcagctccagaacctgaagttcatgttcaagccgttccacaacccggacaagctggactgccggcaggagctggagctgtggctggtcaacctggaaatgatggagctactggtctagagttaggaagtaatgtactcaatggtgggaaagaggatggtgaccttgctaaagttgttgggggtggatcactcacccgagaaaacgccgtcgagtctgctccagaacgagatcaaaaaactgttggcaatggaccagaacctgctaaatcctcagctcgaccacctggaaaagtgggttaaggagcaggcggtttagcgaaccgtggtcaggtatccggtcaatcacccgaactacgtgcagttcttgtatcaccccaacctgaggcccacaattcgaatccatcattaaagccagaaacccctccatccaatccttcaaaatcaactaaccaaacagtaaaagttaacacagaagctgaaggtggaaatctaaaccaaggaaaaggacaaaataaccaacaaggaagtagtggaagtaatgggcaaggaggtggtaatggagtaacccataatacaggaggatgaggtggtgcatcgagttcttcagcaggtaatcattcataaagactcgaaagttaatttttataattaggtggtaaaaatggcgaaaaatccacagtatcaaaaggtgaaggaaatacagaaaatggcggtaaagttgaaaataaataattggagattttaattgtatttgaatgattttaaataaatgcacctagagttcactgatttaatgtaaatttccacttaaagtgttaatttattcaaacatttacttaatatttaacttgtttataaacagtaaaggattaaacattagctcttgaccacagagtcgataaataaaacagcctgtgcccacccagcgttgtcccctgcactaagtaatgttagaaatagaaacttacaagttccgaaacgcacttcctatgcgttcatagtctgagtcagacagtgatttcccacattttactccaaacattctatatccaggttaaaagacaatgtgagtatgggatataaattatgaggttaacatacgtatttgcaattttttgaatatgaacatctactggtacaacgtctcgtttccccaacgaaaacagagatacacaatccgccacttttctgccaactcctctatattaccaaattttacagtatatctactggagttaactaattgtgtggttgaatgtggctaataatataatagtatttaactagtgaaagtgggtacggtagtgatgttagagctgatttacaagtgtctgaatcttcatttttgagtgaatatagccaattaagacctcgagagtttaaaatctcaactgttctaaatatgaactcggatctatatcctagacccaatttcttcagttgttcaggggttgcccttcccaactggtcaaccgacggaaatgcataaaaatcaaaaatctcgttattaacttcagatttagccagaaatgtgccaaagttacgcttaatctcgttaagcatgcgtgtaatcctcgtaatattattgtttgaggagcagatgaatgaaataagacattcaaacggttcctgctgtaaaatccttactccagatctgcgttttaaaatttgtttaactgactttggtgcctttttaaagtccacagaatattcgttgtcaaggtcaaagtaatcccacagcttttctcttgaacaagttccaaacaatgttctaatttttcatttaaaatgtggaatataaatagatagtacttggaatgtatagtttatacctatagagagttgtatcggtagactgcttaatttcgtacacactagaccccaaaactccaacccagtgtttatctcccacacacttccacgtaaaagactggcctaataaaatttacactcttgagtcatagttattctaatagatgacatgtttttaacataattttgattaattttacctgttgttaggagtaattctggtcttaaaactgagagggggactctcaaatcaagccattttgatgaagggcctggatcagaacacattttataattttttacaaatttcggaattaatccaagaataaaagccaattttataattgaatccagttgaaagtaattaagaagctataaaatgtactttgaatgttttcttccagaatattttctggaacaactcaagttagagagtcttgcttgaattgcgaaatactttgccctgttaaaaccgtaaagtttggctgaaaaacttctgtagtatcttttaccttcccaataccatgatgctatccatgatcttttatcccaatatacccccggcacatcacaataaagttctttgaatattttgattttatttttactgtctgcaatctttccctctaataaataatcataatcttgagttatttttgtcagttcgacttgtttcttagttgaggttttgctggtaatataaattttttgtccaatttcaaggttctttagaatctcagattctaagtcatacattcgctctagattccttttattgccagttttactatgtaaaactatttttaacccctgttcaattttaattttatcttcttgtggtccagtttctcttttcactctaacttctttattcaatccaaaactacgtaaacaagatttatatccctgtttaatttgaactatctcatcaattttaggtttccctgagatgttcgtgatatattcgtttttccattcattatcagtcctataatgtcgtagaacttcatttggtttgttattcggtcgactatagtactttattatctcataaacgttgattgaccgtttataattcactaaatggctcgagttcgtcccacttgggaagtttttatctaaatttgtacacactacgtcaatattgttacacaagttcaaaattgcatctatccaagccaaatactcttcaaagtttgtatgattctctttgcaattcattattttattaattagtccttttattcatctttttattccttttattcatattatttttatcttattcttctttaatcttcttagtactttacacagtggaaggttaattctcttgtactgtgtggattctacaatattagaattaattattttatattggctagtttattctaacccaagattttaacgatgattcttgtataaattttttatttgataatttttcaattaatatatcacattaattatgtatgtgatttgtttattgcttgtttaacttcgtaacatgcaattttttcataaaattttatcattcacctgcgcatttgtaatttttattcagttttcgctagcttacacgattcgttctaaaaaattcctctttatatatcgtattggttctaaactaccaaaacacattaatattctacactcagaggttcatcatcctctcattttatcatttattactatatttattgttattgttgaatattagcagttttatattgtattgttggttattttataatttttagccttcgccgatgctaaggccggttcggaaaccggaatccgagacttctaaatctgctaaagtacatcacgaacgtttgaggtatttcttgacacattttcctctccatctttctattcaattattgtgttacattgttttactactcttattgtttgggtatcaaattgtgtatagagaaacggtgaagcaattaaaggagaaggaggtgacccagacctcccctggttccaaggaagaacgagagaaggaggttaatagctggcgagttattctatacaacgacgacattcacaagtaatttcctagttacaataatataccaccgtttggttgacaaattttgcagttttatgtacgtaactgagtctatttcaaagtgtgttcctcagctaccactggctagagcacatctaattacactagaggcacataaaaacggacaggctgagatcatcaggacctggaaagataaagccgaacaatactgtagaggtaacaattatacaatatatatactaaatatacaatgattgaataataaaatattagagttacaaaagttcggtttaactgtatgtacgataaatgatatgcgagggtagtctaaatcaacttgattccattctttgaagctattaaaaatacaatcccttgaaatagtccagacgatatcgcaccgtagtgacgactgtccagtgagttttctaataagcaatcagtttctaatagctatataataatataaatgtgtttaggaagggttggtatacctctattatcaccttgcagccaaaaatgaccttgaggtattttagtattgtgtatagtctcgtaggggaccccgacgattcgcttacaaattcgtttatttggattcagaggcgatgtgctaatcacaacgtcgtttttgcgatataactcctgcccttctcggaacttggaaactaaatatggacgcatgtataataccaacgtgccagagtcacttatctcaggactcatgctaggccccttagtctgttaatattattaaatatatataacatcgatgttataatagcattagaatatgaataatcagaaatttatgtgtgtttgataccagggtggcgtcgacgagataataggttaagatgtggaaggtgccgattgtgtagagaagagacttagaaaatgatttgagccttttaaatttaccaaaaaacattatcacaatgattaatgtcagtcattttactcaaatctctaattaattatttattgggaatggtgtaaagtgatattgatttttagtttttaaaattttcattatagttttaaatgcccaccagtgaagttaaaaatcgtaaaatatgtgtagctgatcccgttttccagaatggagaatttgaagattccaaaattgatcccaaacctaattctgagatggaatctgttatggaatctgaccaaattcaaggatcaacttccgatgtaacgttatatataaacttatttttattatttttaggtgattcgtggatatactgatcggataataaaaagtattaaggaatcactttcattttgtgcaaacactgataatatcactaatatttcattactcgatctttgtgttcaaaacggtactttacatttaaatctttaatatagttaattttatttcaaaaaattaaattcctttagaacgaataaatcgcattaaagctgacttgaacaactgccacgatactgtttcattgactgagagacttgtcgaaagatgtgttagtacatttgggtggatttgttcctcagttaagtggaccaacagtgttaaacttgacgttgacgagaatgatgagaaactcaacagcgttgtcaagtcatttggcgactcacacactagtgatgaatctaatggtgacacgggctttcatgaaattccacaaaccaatggtattttttaattttcttcatatttttagaccctgagaaggattttttcgacaatgccactcgtggtctcagctccttagttagcagggtgagttaattgatacctcatttgtgactagatgaagaggaacagggttaaaactgacttattatcaagtgttataatgcaccagaacagtgaacttgagaggatcaacgcctccgctcagaacctcaagaacagagtttccaacatgaacaaacttttaaaaagctaatgtaccatactattaaaaatatacatatacatgtatataaaggtatatacaagtgttgtataaaagtatgtacaattattgcatacatatgtatactgtgtataatacattagtgttatggttccatctgctgtggttatataaatcaagtgtaattagaatgtaaatagtactgtggcgagaacgcccacgatgggaagagtggtggatatgacgaaagccaaatcgcgttccgtgaggtaaccgttgatataacgtttgatatccttggcgtcatattctgcggaggtcattttaacaacttgtttctggaaatcaggttcagaggttgaaacaattagagagtcagtcttcatgaagtgtaagaatgaagcctgtttggacacaaagtcatataacgatacaaggatcagggtatcaaattcgcccttgaaataagtccaaactgaggaacataaaacacgattcgtatcagtagaccataaaacatgcccgtcataagatactttactgaacccaaagtcaatctttggggtataaatatgtgaaaacacagcaccaatcatggtctgtttcataattgagtatctggcagggtttgtaatctcgagagcacagtagtcaacaggctcgataatgaaattgtaggattgtgggtatagcaagtgctgggatagcatttccctgttatattttgacatgatatccaaggcgaaggaatcaagctcttctacggtgtatgatgacctgtcaacgtcgacaaagaagtttgctacgggctcaagtacttcagcccatttcccctttacttttacatagtatttgaagatagaagtcccggcttgtctcacgtttaaaaataagagtgaaagcgcttcacgtccaaagtaaagcacggcctcatctacacgctcgtcattgaccgcttcccagaccggcaaggtgctctggaccactttatttgcgtggaagccgacctgggtatagaattctatcgtcgctataccgtaatgggttgtatgattgactagtaacttatcatttgaactcttttggtccaaatcgagggtgaaatcggcacctgcaactaatttacagaaaaatccaataaagctaagatttaaataaaaaagtaaagaaggaaacatctctaatatacaaaatgcctactcaattgccttagaatctttttctcgtatggggagttaaataaatattgactatttcaaatgattttgaacactattcctcataattttatttattcacatttatcacgtctgtccgaattgtttttcaaaaaattttctggaaaaatatataaatttcttatgcttttttaatcaattgtttattgatttttatcattttttaccttttgcatatttccgtgcatatggcaccaatcattttccattcactgtttcttttattttcaatacttatttttatgaattccattggttttattttagttttttgaatttataattgtttttttattccactgacttgtttacacatttcttccaatctcctgtcacatattacttacgtatttttattttatttattttttataaacttattaattttacatgtaatatttatatatttaactgattttctcaagatccatttttacacattatcctccgaatattacccacccagcgtataattacatactaaattcatatatcatatgtagaatattttaataatagtaaattagtttaattgaggtttagtatcttgagtttgttaattttttgtctgcaaactggacagcttttgaggttctttgcacatctagggcgcatgagtcaatgtgaaacatacttgtgacagaaactgaaatgtgcgcagggatccagcatgcagttaatctccctaaaaataaatgataaaatagaaatcttacgtttcaaagcataaaatgcacttgaacttggactgcagttcaatgttcttgttccgctcagcctgaagttccctttgcaaagtctcgttatactccatcagtgactttatcttcagagtttcctcatcctttccggtgctaacatcaactataaaattattcatacgaggtttatagttactggtcagttttgggtgcgatttaacctcccgggaaattggggccaggtatgagttcaggtcaaccaacttcatttcaagagggtttttagggcaaagttcatccaaatcggccaaatctatccgtttcaaatagaaaaaattgctgttaacacattcgctatagtctgaatctacccttgaattttcgtggttgggagtgtaagcgttggtgtgactaaggttatatctgtcaggcgttatactatcactattgtggcttatacgtccatcagtgagtattttgaacgatagacttacccagttataccaggggatgaccaccgcccttctaacatcgttgctgtgtagtgatatcagctcactgctgtcgaggtaaatacacacacactcgtacagtggctcagactcgttcacttttgtgactactgcaatgtagtctgaagggtcatttctgaacttatccagagggtctctgaactcacagaactccccaggcaccagcaaattacctccgaacttgtcatccagccccaacatcttctccactgagtcaaggctaacgtcaacgttaacggcgtaatcggggttgttgttgtatccacagtttctgcacacaaacccctcttcatacctcgtcgttatgctactaactgagcagcctgaagttgagccagatttgactataccagggatgttagtcttaacctgatcactgttaaggacctcaggcgtcttatatacatatgagtggtccatatgaacatctttattaatctcaatagaggagttgacatcactatttttacgcataagatgtaacatttcacagtgtgatttaaactcattagatttagcgtttagtctgggatgtgttgatcccagtatgtggcaggagtagttatcagtatacccaccgccgtacttgaatgggttcaggggttgaacaaatttacatggcacgtggtctatctcgtcattatcatataacaccacaagaacgaggtcaattgggttaaccattagaacctttgcaggccaaaaacggcctgaaaatgcagttctgttatcatcctgtgttggaggccaccatactcttacattcactcccaccaaccttttcatgaatatcacattccttaaatgatctataaactggactgatgtgtcatatctcgatatcttcgaataatccctataattcatctgacgttttctggtaacacaggctggttccttcaaacatgaacggacgttctttggtatctccttgcactcagacaagtcaactcctaacaaataattaatatacttatgatgttatatgttatagttgaacataccttcaatggttctgagtttgaatgggttttcaatctcaaacattgaattgacaaaaaagccaagcgtctcaggcttaatgttacagtttacaagacgaacacactctaggtcactattctctatgaaccttaccaatgccgcaatacaagcagttgtagatatcctaaattaatacctcagtaatatatataatagagaatatagtagttgaatgtacctgttttctgataaatctagtattttaagtctgcttgggagaatttctatagctttagttaggtattcgtttgagaatctacactttattgtgaggtgttcgagcgtttcactctgggcatttaaggcttcagacaataggttaatgaacttcctgttgtctgaattccaaatgtcaatatgtagttgtaaaagaacattccttgcggtggaaactgcagataaaacatagaggacaatttcagggtcgtgtgtctcatacaggaatattgttttacactttccagacaacagaaggtcggaaatcccatacaaaagacgtacatctgttaagtgtctaattgttagtgctcctgtagattcattaaacatcctgcgaagactagttctgagtgtaatcttctccgacgtttcacccattgtaacttaaaataaatgaaataacatgtgtgtaatgaggtggttatttaaattcttaaaaataatccaatgttgaaaaataaaaggataagaatccactagcgtttgaaaattaatattcaaatgtcatttgaaaaaataaaaatttaaaataaattcataccaagtcaaccatgtgaagaatcccaaacattatgaaacaatattgaaacttaaaaataaacaaattcgaaaaattacaataaatttaaaaaattgtcaaataaaagattctgaaattaaaaataagtaatttgttaaaaatagcgacaacaaaggaatcaaaaggcattttgatacagaaatactctaatactaaaaaatacactcaaaatataagaaatgaatataaaataaaaattttgaagaattaaccaaattagaatcaattaagaaattgaggtattaaaatgtgtgaccttcatgagggaagtaatttggtataaattggactattgcttaagataaacttcacagaataaattatatcgacattttcacaaaattttgtttttaccaaattatgtgttgattttttacttgccgatggggattcagtgaatcaaacataacatttattaattatattttaattattttaatccactataacattttgaactcattatatttatatattacaggtttgttaacttatttattctgttgaatgatgatttctctacccttgattggattctttaaagaaccaaatgaaatttaaataacggagtagatttcaatctgacttttacatattttattatccaaaaattaagatattttaggtgatgtatcatgcttgttcccactcattggctttttaaattacctatcgcaaaggaccgtgttcgttttcttcgactttacagtcgcgcctcctttattttggggcttggtctagcttactatggtcataggccaaattacaaggaaacacctgccaaaccatcttttttttataaacttcgtctcaagactttgttggcaaggaataaaatctcaaaagaagattatgaaagatatttagattttaaaaatttgtgaaatttactctttttaacaccttcatttgaattttaataccaaaactctacatcacaaactaattttataacatgcactttataagatattaattacttaaaggtgtgttcattctcagtcacttaaatccatgctcgatgatagtcgttggatttcattctcgctaaaattgtaattttacagttgtttcttaccttaaaaccaggtactgagagtttatgtacctttcaatggagtctaggttgtaagctattctaagacccccaaccataactcccaaaacaaatcctgcaactcctccatctaaatacacattactacgtgaatcttacataagtggcagttttgataatcgtagaacgaccaaattgctattgtaccaggtactgcgcccagtattccagaaaccaaacctctattcaattatatatttttactcttatttgtgtatattgtaattaatatgtgtaatatagtgtgtaaagttacctaaaaccggctagaaaaatcgacattaaaaagagcatacaagatgtggtaatgaccatagcctggtatttaggcgcttctatcattattgatgtcgcaatacctgcacctgttcctattatcgctgaggttatcaggtgatatccaccccctctgtagaacttcttactcttcattccctaaccagatgactaagtttttacttactttagagtacagtttcgcggtcagatgtacaaaaattacagccgtcgacacttggattacacagataagcaccatgaacacctttaatggccagcaggacattttatctacgcagaagtcctttatctaaaaaatatatcatatcaaaatttttagaaaatttttaatgttccttcacttactactttgaatcccatgctatcatcctcaactggcatttctttatgttttgctggcactctctcgcgtaatgtgacttccatttttatattaacttaaaatgttttaatttgatattctaattagtggttcactgagtttattttgttcatctgagcataattgcttgttaattctgggttctaaattattattttgcatatttgaatcaccttgactcacatgtatgcggttatcgtatactaacttctaccgtaacatataaccatatattattctaaacgtactaatacaaatatacaataataacatatgaataatatgtgatgttaatataatactaacacatataacaatatattgctattacatactactgcaacattgtatgttagtgaaaaaaatatttactatcaagtacatgttctaggttaaaattccctttcttcggaggtggtctgaaattgatttgtagtttgtttagtacagatttatgtaagtcatcgagtatgggttttgtgtgcatgttgaaaaactcgtttcgtatgtatgtgtgcatcatgtccaccttgtcaggatggatccaataactgtcatgtactgacgcaaagctctgcgtatgcttgaaaacttcagttgcagtcatcattagatgtgaggcatccagtgagtgaataaagtttggtgggaaagccagcttctgcctcctcttatcaactgaactaacatactttgaaacgttaatagcctgcaatggtgttctaaccaccttggtcactgacttacagtagggttgttcacagggtaggcctatgggacttatccaagtgactggaatgttgaacttgttatggacacagctgatctcatctagccaattttttatggacattgcttctgagaatattgttgaaatgctggaaagtattttgttggccaggtatgcagcaagccctctgagttcagatggtgataaatatgaaatcttctttatgtcctttaacttcgactccacctggtctattgctccaattctagtcactccgtagcaaatagtcatcactgtctgcttgatcacctttctgcacagtatgttattgttcacacaaatctcactatactttttattactctccacgttactaagtttaccatttcccgtagtaaccagactgttattactcacaccactaccagatgtatagttgagatcattatataccttctgtatgatcagttgtagtatgtgtgtgtataggtcttgtgggtgttcacaatccactaaattgacgtattttgcacctttttcatctagtcctaaagctgcatagtgctgtaatccattacatgttccgtcttgttgtattggcaaatgtgtcatatagtcttctgggttattagactctattgctcttactaactcaacacacgatgcaaagaactggaatggtttatctgctttaacccagaaattctggttaaaatccttaaaaggactttttactagctctgttattatagatatatgctcatcaacccatttaaccctgtcttcaaagctgatcttatcatttccgtacatgttactggagtgcacctttagccagaaaagccctctatttcccaattttctcttttctgaaaataacagcaaactcctgcaaaggtcatcgttcatgtggttaaggtatggtgacaatgggtacattcttcctctaaaatcgatattcagtggcatatataatctcctttcatttgcaaatgcgtccgctatcttaattctcctcaaaaacaacgacagttcactcagctcgttactgctcagacttgtgatattagagatggtagtgttgatattctccataagatttatatttgtattaactggtagatgttgttttattggcatatcagtttggctgttacaaatgtgtttaataagtttcaacatctgtgaattaattatccagggtacttgtgagaacttgttcactatatcaaacacgttttccaggttataaaccttaacttcgttcagtttacttcctcttataaagttatgctttaacagtattgaaccccctgttgttgcattgatccattttttaggtctgcaaaccatcggcaatgctgccaaagacactaaactcttcgctacaaaatctctcagctgtagcatacagctttccctcatctcaagcactccaaatgtcttcactccctgcctcagaagcacatgcctaaacgcctccacctccaccaacgactcgttaaacctactcttctttatcacgtttaaaaatctcattattatactcaatttgtcattacctaaattactttttccagcaaccaccggggccttatccttcacatttacttgtacaatactatttttactatctggagaatcacttttctgaatattatcaggtgatgaatcattatgactagagctgtcagttataaggtttggagttttaatatccattgactgattaaggtagcatgaatagttggacaagtactgttttagtgcggtttggaggtcaagttctatcctacatgacttgattagtgcgttcaacaggtaacctccagctgctgctgactgtgaactgttccaattcttctggtttctgacggtgttattcagaggctcaatcactgcgttaagactagactttaccacaacactgtcattactctcagcaccatttccagcactcttaatctcaataaaatcctcctggctgaattctttctccagtgatttacctgaactaacctctacactggcaattttatggttaacaggataattattagatgaattattagtattatccacattggatgcattatctgaatctttagtacttaatattaaactattgtaaagtttccctacttcatctcctagttttatggccaaatgtgagattagaatctggttactattagtttgctgtattcttttctttaaaagacctcctttattacctctggaatccagtgtgtatgatgggaaacacatcgattggagaactaccttaacagttgtggttgccagtaattcctcttctaaatccagtggtattacaaatgttccacccttctctctatccttcttaatgaattgtgagatgtcctgaatccactgagtgcaagtgctagaaagtgatgataactcggaagggtgtttgaagtctagtaggttagaggcctctacctttgccgtctccagagcctcactaaagctcaacttctctatcagctcctgccttttctgacttaatactgagtcataattagtatcctcatgggtttcatttggggaatcaggtttaaaattttgcgctggacacagtaatggtaggtcattgtccttgtaaagtttcttcttttgtttccttataaactgtggcgaaaacaggtttgaaactgatttaacactatcaacatgggatctaaagtcatctggagaaacatcagccagcaaaagcccatgaattgatgaaaacttctctgagttcctgaacaagtgtattacttgctcatctatgttcttcaaaaacgattgcttattagttctcagccactttgatatatcctcggctctttcaaatactacggatttaacattcctaagtaaaacatctgaatcatccttcgaactctcaactatcttattcctatctgtgatatcaggaatacttatagtttcatccggatgaattggagtgattttatctatgatgaaggcagattctgatgaagaaacttcagaaccaagtgaaaaaaatgacggctcgttctttaaatcttcctgtgtagaagaatccaaactcttgaaaaatatttttgaagatgatatataacgttttaaaatcttatcaggaatcgtgtgcgatgtgagataattcctattatttccaaaataaatcctttgtatgttacatattttgtgtaaatttgtgtttaaagagcctgaattaaaggctgttacattgttgcgatatatgatacagtttaaattggccgtgttaaggcctatggatcttaccatgcttaaatacagaaaatcataccattaggtactacatattaaaatattattagtttaaatattgattttaatggcgaaaattcattttctttgaccccataggttgtgttttaatgtgtgacttcattcgcaagaatctttcatatttttgttaaatgacgcctagaaatattgtttattccaaatgtcgagttaattatctatataattattacgacaattatttaaatcctcatggaagatcttttagttcaattgtaaaatatacaaacggttcttctactattaattttaattctaattctaaaaatgatgaaattaattgtttaaataaattatccctaaggttttatggaaatgttggaaaagactggctcccgaaacgaaaccaatatactaaatatcgtatcactaagccatggacctctgacagtgtttacgacgatttattcctctcccaaccttccaagtaaattatatactatcacataataatatatttcattgttaacactggtttaataattgtttagggaagatttttacccattcaccaaggagatgcctgtgtttttgaagtttcttaaccttttaaccaccgctcagaacaggaaagatgttttcgtggactttgtcaagaggtaaaactttaaattacaatagttaattcataactttttaggtgtgagaacggccttgttgttgagaaggacgtttacctgactaaggatgaactactagagtgtatgtgggctaatggatactcagattctgaaatgaacgccttcagatttgcatttcccaacgattacaagtttcattatccaggtaccaaattatatcctaactcatttattctgtgctaactaatttattctgtgctaactaatttattctgtcctatctaagttttgtaccattaatatattgttgtatgatgtttgttagagttggctgtgttgtttgatttgggtgaagaggactgttacaaatactgtgttaaggagcgggctagtaaccctgaggagttggtagagttaaagttgaagaaaccaacaaacctcgtgtccagttatgggcttgtgttcctagggtgctggtttgcactttctaacgctgttcttggaaacgcttggttttttgctaaaactcttccttttggagctgttttctaccttctagcctcatacttccagaaatggctcaaggagtacttttggaaggaagaaaacgcactaattgaaaaggttaaacaggagaaagagtactgcgaagatgccatatactcacaactaagaagtatttaacgtaattgaataaatttgattttagagtacttggaagattccaagtgtgttgactacgttgagagtttcaagtccgaagtggttaacaggatggagaactacaagaaggcacttctggtcaggatgaaaaatgaagccgcacatctcatgaaggaacgccttaacaacatggcacaccatgaagccgcaatatctagctcactagaaaaggttcccataaataattattccttaaaatatttacattgtataaatatttacagaatatgataagtgaattggtgaagttgtttttggagactttttccgccagtcctgaaatgaagactgaggcattagcctcgtcaataagtgaacttaaaggtgaatacaataaacttgaagaccctcttttcaagttcttcaacaataatcttggcgaatttcaatcagtattttgaattagtttataaattattgttagaatgaaagtaaaaaacgctcaaaaaatgatgggactgacacctttgttgataggtgtaacaggctttttcaacaaaaggaacaggaatttttaaacaccttcactgtcacgtattaacttattccattaaattaaatgtttagacctgaggagtttaacgaggtttcgagtttagccaggctttgcaagtctaacaagggatttaaccttgataaactaagccctgatcaaagatcaaaattggataacctatacctaactctatcccaaaagtactttttaattttatttatttgtgttcaggatgggttactatgttccaactgtgccaaatgtatcagttcaaggcttacctttaactccagctgatacttcagaccaatcagactcatttctccacaaagaagtaagttaccagctctaaaattatttcctcagctttctgaaaaactagaccttgttaggacatcaagacttcatgatttcttaagacaatttgtttaattatactaatgtatatacataatagtatactaatacatatataatagtatgtttatacttgtatatacattagtgtataatgattgtagtataccacataatatactaaatactatataccgtatattaagtatattaacatgtttatgtgtatgatggaatattaaagaatcatgttgaggaggaggaccttgctctggatcctctgataagccttgaaaagagtgtgtagagacaaaagaaagttgtcaaatataaaattaacactgaaaaattcttgaatgagcgtttaaacttgaatttatagcaccaaagtgtagcaataatggcaacccaggccgaagtgctccacttccaaatctcattacgttctaaatattcattcatacatgtatataataaaattactataaatattttgacaaactaactgtaattgcaagttataataatggacgtacgagagttattggttggaggagtcacgtttggttttgtgataaaaacggttaaaatcagctcctcagctgagaacccaggcaggctctttagaaccttttcgtcacttaaaagcaaaccacggtaaattacccttatattacattctaatcaatggtaaaaacaatttaaataaataataatatcttctaaagtagtggaaatttgaatagataaaaaaatagtgagtatgaaacctttaaaagtctcagattccaaaagtttatccttaattgacttgactttggttgcaggggggaaatcaatatctaaaaataaaattaaacgttgaataaaaaagaaaattaggataaatatgtgaaaattgttgagagagtcgtaaagtaaggataaattgtgagataacatactttggactttaaattcccgatcatagtgatttacgagtaatttgacgttgacattatccataatatataaaaatgtagataaaaaattagtgatttaggatggtgtacccccagttattgtgtttttgatgtgaaaacatgcggaagccagctggaaatactgcgatcctcctaaaattattaataaaaaaaattttagaaaattttaccttgaaggagtgcgaaatctctgtttgccaattccagtgaaattttcgacttctcgatgtctccaatgaagtcacactcaactacatactcggaaatctaaagttaattcataagtactcagttgataattggtgttaaggtgtacatgattctatacctgttggaagatagctgaaatatcccatccgtcataaaccacctccttacacacagactccacctacaaaggtattaatttccgtcaacttcttcaagtcaacatttaaatcgcgataacttgtagctaagatattcactaacatctccttctgggttcttgcaaacctcgaaaatacgttccacaacctctttgggaggtttctaaacatcagttaatcactagaatcatggatatgttcttacccctgaaacgctattaatagcgttttccgtgatctcattatataaacacgccgttgactaaacatttattacagatttattacatattgtgtcatatattatttagtcataaactatagttagtaatttattacctggagaattgtaatactttttctcatatctcctgatgatacggttgttaaaaactcaagtgcctgacatggaaaatattgtacatgaatattaccttttggtcaaaagtgatcccttcctggttgcaaatgtactttagtctgtcgacttgggagttggtttcgatgggtttgaagtggaatacagaacaccttgagtaaattggtccgataattttatgaagataattgcaaattagtacgaaacgtgaaatgctagaatagttttcaatcacacgccttagagcggcttgagcatctgctgtgatcatgtcagcctcgtccagtattatcattttatagttaggcattactctaaaaattttggtaaaattgttaaatttcgtatttttggtaaataaattacctgttagtctcaggattgaccctgttatttgaaatattaattctagtgtaggttttaattctatccctaacaacatcaattcctacaacaacctcagttattattacacatttaactatattcatagagaaattagtttaaaattacctctttcatctgatgcattaagctccaaaacacgttctctcatgccttccaatctaaatatacaacatatacaaagtttgtatcagtaggtgtataaagtgttgtacccgtaaatttgtcttgccatagcgagggctgccgaggttttcccagttccaggaggtccatggaatatcatatgaggcatctaaaggacatattaaagaattatacatttacattaaatgtttctacgatttgttccattatagaaactgcttgggtctggaaaataacatcagatatttttttgggacggtatttttcaacccaaggtacgtcctttgtggcgcccatatttaatttaaaaaaatctgggccacttggtaaataaatttaattaaatagtgagtggtgtggaatctcagcaaaccacacatagttgatatgaattttaatatcggattcctcttcacattcccttaatttacactttaaattatttttaaaatgatattgaaatattttaaatggaatcatgtatttttgtaaatgcaaatttatcataattttaatcgtaaccttcattaatgtgtattgcgttgaaaaatgctccgatttatctcaagaatctcttcttattggacaatactgcctttcagtatgtttatatatttccatacttaatatttcttgaagttatctttacacatttattgttctattcatcacttttttattaatttttatttttagacttgtgaccatgaatgtgttcaaagggtttcatttccaggcactataagtactttttaacacgttcttttataaaattatggtttagatatgcccttgtttgaccacccagttttggaatctggtactattttggtttttatagttatttagactgtgaagggaaacgaggaagactcctttgtatgtccacagatttaacacctcatggtaatttatacgctttttactatttttataattattaagttgagtgttattttaattaggatatcctctttgtgaagttttgaatctcgcctattgtgagcctagttcatgtgcttgctggtactattttaaccctttatcgttattaggtcctcctgtatttcacgccagtgccctcccaaatttactccaaagaacaaccaagtcaccaactcaggtaccttactactacataaataagtgataactaatgtataggatgtttcgatactaatttaagggttttgtgcgtttcatagatatcttttgactattaaaaggtcaaggtttcagctccaaatcaaggatcattggggttcataaatcctaattgtccttgtttggcaagtttagtttgacttgcatttgtctttgttgaacgtaagtcctaaccttgcggccctgggcagaacgtactctcacaaccctggagtgaatggcacagctaacgcagtagcactgcttaatgtacaacttcggcacattgaacactatataataatattaatatttatacaagtagtgtatgtaatatgtaataaatatattccactaacgtgaataggcgcaggcttccctaatgtcacgctgggcgctagcgtctacgatgttcctaacattaaagcgcttaattgacttgtcctttggaactgaacggccacagttgctgcatctgacggggttaacatggcctctgccgtgcttagatctcccagcgttacgcctcttaaagggcatcttctatctgaaaatattataattattttaattaaaaaatgtaacatataataaatatttcagatgaagtaagtactgggttattataaaattatcacaaaccagataagaatcctagaaataaatttattagtcaaccaataaatgtggttgtcagtttagaaaccagttagaattaggagttaaaagtagtaaaaccagagaggaataaatctaatagtgtgaaattgaaaattatataataatattaataaaataaagtatgtattggggattgccaatcaaggatcagaccccattaataaaaacatactttaaggattccagcactaatacaccaactgtgtatccaactacctatacaagtaatttatattattacatacagttactataaagcggttatgttggaaactttggaaactgtagtgctggaggatcctaaaccctttcacaatccgtatttataatattaaaaatgatcactatcaaatgattataataaaatcttttgtaaaatagtttgcaaattgaattatgagtacaaataaaccttcacttaataaaatacacgagttaggaatcactatatttccaggtttgttgttttaaatttaaataaataataataaatgatatttttatattatcgtttagaaaaagatgcaaatgataaagattttgaaccttctgaggatttctatggctctgacttggatgatttggatgacgattttgtaaatgataactacagttcgtttatacttaaattaaatattaaattaataaatttaattctagtttatttaatttaaatgttgtttttaacttaaatatacaaatttaggacaaggagacaagtcaacagatgccgttctctgctgcgcaatgtgttttactcctgtttgttatcagtgtaaaacgtgagttatacctaaataaaccaatttatttatataagtttatcatataaaatattccaaaatataattagtgtgctagagtatatgacaatctcacatgataataaaattattaaaataatttagagttggaaacacattttcatcaaaattggctttgaatgcatatgttgaggataactactcagattccgcaaatagaagtgattcccgagatgtacttgggaaaggtgattctactaagcggaagttgaggggaagcacaagtgattcagaaagaatagtcaaatgtatagaatgtaacaacgtcatcgcagtgttagatttttcaaataattataattttaaaaatgttatcgcaagcaagccctgagcatattttcactacattccgctaatagaattcattcctcttcattttaattttttaaccattaaattatgtatagattttaaatttattttataatattttacctatcattttaaaacaagatgatagtggctttgtgttaatattttgtgcttgtagactaatttcagtatattactttaataatttaaattaacattaaaactgtattataatttttcaaaccaagtatctttagtaatttttcgtcttttatttttttgtaaactattaccaatcccatgactaatcagtactgtgtaaactatactctcttaaataataacagtttaatttcaaattaaagacatcatttccactctataaagattatgcgtctgtttgtttataaaattcttctggatcaatgtcgtcggaccaggatgccttcttcgaagtggctctggacctgatagcctctgacttggagctcctagagctctcaatcaatgatataaacatcgcactaggaggaagcccagttctgatccctgattcttacgtgaaaaaggttagagaaggtgggctttatgaatcttttaccagaagtgcaaggaattcaagaatttataagtgctatgaaaggtttaaaggacttgatttacaagtcgacagcttctttagaattttaaaattacacctggaccgcggattctcatttctaaaacgatttaaaccgataaaccatttagttaccgtgaagctcttttgcctgtgctacgttgatgtcatttttgatttatactacggagtactgaaacaggttgtaaactttacaatccacgactgcgtttatgttttcaagtttttttctaggctggacaacacgctctctacccacagaataaaacatgtgtacgtcagggatgaaatctacgacctcatcttacacgccctatggttcgcactaaaggatgcctggtggctgtatatggaccctaaattcataaagcctttgtttccattcatagcacacatgagagtaaatgaacactatgaagtgacgatccatgatttaaaccacgtactacacaacatacactttgtaacaataatctctcaggatatcgcatatcagtctgaaacggcaacagtcgttgacctacctccagctacacctgataaaatatatacgcaaatacctaacacaggaagcgcaaatcactctccaaatccaggagagggttcaattaagtatgaagatatatcggaatctgacctccaaatcaaatacctcgggactgtaaacacctttggaattgatgagtcaaaaactgaagttgataaaacaggctcagttaacccagatgaaccaactgaaggagctaataaagtggattctgtaaaccaagttgacacagtggatgaaccagagtcactagaatggatgaaggtgggtggaacatcctcagaaagcgctaactttgatcttttagcctcatctaaccacttaggagatattcaattctcaaaataccagtttgacccagatgattattcagataacttccctaacgatattgataactttagagtcgagtctgaagttgattcagaccccagttggtcccaggtcatttacgtggttctggttggatttatatatattgtcctttttgagtcatatattaaggaggtttcaaacagtttaaacaccaaaatgagtcctgcaaactacgtcaacttcttaataaagaggctccaggatgtcattcaggtaacaagtcttattgtggaagttgactgtaactttactgcatgggcaagagataagcttggagactcgtcggacccatacctctcaacatgtttcaattcatactctgatgatgtgttttcatttaacaataactatacatacaggtatagggatttatatacagatagacctagagtcaattacacattctcccaccaccccgagtataaaaatgacacaaacactaataacccatacatatcatttaattcaaaggatcaaatgaacctgtacattttatcactaagttttgatagagcgcagaaactacaatatgatctaattaaaagagtatctgcggtttgctcagccccaacactgaggtatatcgacaacttgtactttttaactgattcgagtttgtacagagagattttgtataacccagaaaagtatctgataagcccaaacgggcctctgtcaaagagttgtaaacacctgccaatcagattcaaaagggcaatttttgtcgaaacctacctcaaaattgtttccaagtacgtcaccaaggttacagattatgaatctgagccgtgcgaggccattttcttcgactcgatgtcactttgggactcagttttggacttttttgacttttcagcaaacccacaaatcgttgaagaggagtgtgttaaactagtgtcaaacttgctggacaggatcaagttcacgcatcgggttgatttgagtgaattgaactcttttaagaataagttcagcagtagctttttcacattttcaaattcatctgaatccctgatttcatcctatgcatacaagtgtatatcgtttctgaaatctgaaacctcttgtaaatttgactctaattctgtacttgcagaatctgatgactctgttacgagggatgtaactgactatactacagatgatggctcactggatgaaatttgtctggataagtttaatgtttggctagacggtgttcgtaagaagcgcatgcttgttttcgggaatgttattctgttcttcagggacaactcactacttcagcccgttgggttcatttcattcgactcaatctactctgtccttggcccgagaacaatggctcaagtccatccaaatgtacatattttggaaaataatagtgaaaacgacagtttcagctgtggaactagcgattctagtgatttatccgattcgtcagaggacccacacccccgggacattgaagacaaagattcaccaaatattagcaactcttatactgttaatggagatatggatatgaaagcaataagacgtgataacggcagtagtaatagtgcaaaaacgagtaggcgtactagtgtgtccgataacatgatggtttggggttggcaggttcgacttgagctacttgactcttgtgttttggaagatttctcaaaatttgacgttgtggcggatttcgaatttccaagcccagaaaacagaaagttctggcaacaactgatcaaggataaccctggaacaaggccgcaatttttgtcctggccctaccacacctttttctttgactcaatttaatatataccctacatgtacatagtaaattcatctttgaattctaattaaaatcgtaaatctatccgagtgtaatcttgtccagcattcgttcaaactcttcaaaatctatctctccgtcatgattagtgtcaatttcgtttaaaatttggttaaataagttcggggcatttgaaactcccagtatctgcagcatagtcagcaattatgaaaattgtattttatcaagttatttatttaatcataagtagaatccacctgtgatagttcagaattgcttattttgccggagccatcgacatcaaacgttgaaaacgctagtttaagcctctcctttgaaagtagggttagtttgtcgatgcatccagttatgaattctacatttcaatatttatagtacaaaaggtacctgaatagtcaattgagccactgtgatccaaatcacatgacctgatgatttcatccacctccttctcaatctcctcattgctcatccttgagcagccgtcacgtaaattctgaaatagtattaaaaaattaattgtagagtgtaaaataatgaattgtactatttgtagatggaatatgtgtgtaaatttgaaacctgtttaatacttttatatccttgaattagttcacttcggtcaagtgcgccgtccccattagtgtccaactgtgagaatagtttcgagagttcattgatctcgtcgttggtggtgaacttgtttgccattaaaagcattaccgcttgtgcaagtttttgtgtttttgtaaatgtttttaggttttgtagtgcgagggacatgcttcttgttggagccgtttccctcccagcgttggaatacttgaggacccaagggtggttcagtgcctgcgctgctgatattctcttcttcggatcatatgtaagcatgagatcaataagatttttggcgtcttcagacacatcacgccattctttatcaggaaaggtgtactttccagctattatcatacgtataatgtcactatcgttcggtgaagtaaagggtggatatcctaagatcaaatcaattaattaaatatatttcattaaagattaattttaatatcaatactaatttcaatagtgtaatatataaataatgtttaataatgtatagaaaacgtaccacagagtagaatgtaaagaataattccacatgaccagacgtcgcacttttcatggtagtttcggttaaggacctcaggtgcgatgtaatacacactaaaataattttatcaaatttctcagatataggagttaaataaccgcatagttttatataaatcaaataatcaagtccttacgttcctaatctttcctttagaacatgattgccgaaatgggctgaaaggccaaaatctactatttttatcctatctaaagagccaggtttttcaagtaaaaggttttcaggcttgaggtctcggtgaacaatgttatttttgtgtaagtagcaaactccagaaaggatttgcttaatcaggcaggctgactcatgttcagtaatgcgttgtcgtttgataatctcatcaaacagttccccgccatagcatggctccataactatataatatgccaccgaatcttcatatacgtcatataatcttgcaatgttcgggtggtctagttccttcaaatacttaacctccctcaagcggccctgggaggaatcaattgatgaggatcttaacttctttatgacctttactgcgtactctttggtactatttattctagtgcaaaggaacactgtgccgtaagcgccggttcctagtttcctacatactgtatacaagctgttaaattcatcctttatgtttccaatgtacatacctatgaaaatgataaacttatgaattgggcgttattgaaatgtgtaaaagaaagagaatactacataaacaaaacgtcaataaccggtttaaccggttataataggataaaaagtaagaagattacttggtttaagtttaatgtcagattcaaaagacaggggatcttcagtatcaccgctaccaggtttgtgcttgaggtgaggggaatccaatcccctaggccgtgaacacttacatcccataattaaaatgagctaaaaatcgaaatgaatatacaaatattaaaaaaagttaaaaaaatggacttccatttagcgtttattcattcatgtaaaatttaaaaataatgggtgtgaatattaaaattttattaattctcacattttagaattaatggaagtcagaatcacagagagctcaaacacatgacacaaacccaacactcaagctaaaattattaattatttaatagtaagattttgtaaaaacagtgtattataaaaaagtatctgaaaataattagaagttcaaaaatgggctcagatgtgttaactgatgaggctgaaaagttaaaggagttagcgaggtccaaggggcttttattaccaaatttggatgaaattaatcctaatgttgaaagagaagattataatctttcaataattgatatttctaacaaatttgaggggatatatactctaattcaggacataagaggtaggaaattcaagtacgataatctcactaactggaacccctttcaattcgagtatcatcatggttgtaaacctttcttcaccaaaaatattgaaaattttggctatgatcctaacacatcgaactgcaagtgccctgaaaagtattttccctgtactttaaatcatgctctttctgacatttcaaattggtcaaacagcatacgtgaggaaaatacggatggcccagtggaagatttagccattgttgtcgatggtctacaaaagatagatatccagggcaaatcaatcacgaaagaaggtgaactaactggtttgaatgaatcacaaggtgactcaaaccttgagaaccaaatttgcaagagttctgacgtcatactttgctcttctaagggctttgtaacccaaaatactcagtggtacttaataagattatcccatattttaatttaggtcagattggagtgggtgtagtaccaaatgtggccctggaatccaggaaagattcagaataacttacaacgaaaataattacaaactacttaaggaatcaagagcctgtgaattggccaaatgcccttacaaatatgcctcggatggagctaaatgtgttctcacaaaaacaaaaacatacgcacgtttggacgaccaatttgacccatcatatcaaatagccgaatgcgaatgtaaggaaggggaaagattatgtacttctgatgaagcctacaaatcaatcaatggctggatttcaccatttagagaatactgtgattcagagctaaccaagaatcaggattctaacatattacaaaaggtaattatcatattaagcatgtgtgtacctaggatatcatggacaaaggaaaggaaatcttcgggaaaggtttaaaaatcgaattttcagacggtttctacttcgactgttctgagaattggggaataggccagccgaatgacttacacatatactgtaaaacaggatcgccggtgttgtgtacaaaggaaagtccaatcgattatccagaatgttagtttattaatcaacatataatataagtagtgccggtctctttggctgaggttcaatcgtatataagaatcagaagtgattatactgggttcattttagcgggctttgtgttaatattgctgatgattctatttaaaatttttaacaagaaaagtcgaaattaattttctaatttttaatttttaataatagatgtgctcaggacaaatagctcctttaaagtgtgttcacgtggacgatattgatatcaacttcaaggattccttatatgatgcctcatacattttatataatcatcaaatccattccatctggcttgtaggacatatcaaagagtttgaatatctcataattaataacatttttagcgtaaatcatgaacttgaatttttcgactttgacgacaattcaggccgacctcttagaatccagtattgtaggaagtatatcgaaccgcaagtaaaagacaagaacattatcaaggttttatcatagaatcttaaaattattaggttggtaatagggtttctattatctgcggcatttcacatctaattatcggaaaagaagcatatttaaacttcagggtacttaatatattattctttgtctgttttacaccaatatttttaattttaggtgaacaggatttccaaagcctatgattttaacccagaatatttctccgctaaggtaaaggccgtgaaaattacaaataaaatttaggtaaatgaatggttagtatttttttggacaaataaatgtcattcgaatacatgaatcagtcaaccatttatgatgatgcagtcattaaaaggtattaacaatcaagataattcatattttgactagttttaatgtctgtgttgcttttaaggatcggttttcctccactaatggaatggactgggatagaacaggagaggttatggtaaactcctcatttgataagactctatacatatattcagtcaacaaatcatggtataaatcatattcttgattattttcagtgtcacaaacgtacttcaaagtaaaaaacacggagttgagctggttaaattcacaaatgaaggaccaagacatattttatgttcatctgggaaagaatcacctaacggtacagtttactaaatttaggcactttatatgttataattgggcataaattatatatgtttagtatccgttagactttgggacattgtagagaatcgatatgtaaaaagcttttcactaaatacacagtataatttttgacattcaattatttttagcttgtccagaggggtggggatagtttctcacccgaatagaactatgatgattactaacggttgcgatgggaccgtctctgtgtacgcactcgataacacaacaccaatagtattacgtatatactaatacttacaatcagtatgaataattatcctaaataaaaggttaactataagttaatttagatgacatatacaagttccggtacatcagtggcttcctttgattatgacggcatgataataggaaagtattctggatcaggttccagttcaaagacattctcactatatgacctaaacaaactacaggtttgttttattcttaaaatacttcttagtctccatttaaaacgtttgatatctctaatgtactgaaaaggactgaagaagttaatgttagttccccaactataattcattggaacggttaacgatattttagagtgtgttgttcaaccctaacggaaggtttgcggtcttggggactaattttagacgactggtgtgcgtaaatacagtaaacgggtcggctattttcgcatcctgttatggagatataccagcgtcaaaatcatcagagtctgacatatgctaccctgcaatctctccagatgggaaatatcttatctcaggtacacccctgtttaacgacgttttaaaattgttttagggtgctcagataatactataagggtttggaacttcaaaggtcagcttatttcaaccctcaaaggccatgaaggtaaatttaaaaggttataaatggaacttagggccacctgcattcgtgtcatttaatccccgaaaagctctgatatcttcagcttgtataaaagtagcatggtggatgcctagcttgaaaattggaattgaggaataaaatgttattagatttctgttaaattgagaaactccatgaaataatataatcaaccatctaacctcagatttttgtttaatttcaataatagtaatataatcggatccatatattatattttacatgaaaaagtttgtagaaatataaaagaatagttaaacgtgaattaataacactaactagtgtattgtgattaaaatcaagtgtttgaggataattggattggacaataccaaatagacatattatttcgtgtaaataataaaaatttcaaatatttgttaatggaagattggtaaaaaatgacttttatattttgtagggaaatgtgtaaatcgacaatgtctaaataccggcgaaacggtaattatttatttattaaactgtgtaaacatttatttaaaaaaatagtcattcaatttaagggtaaaattcgttacacatctcaggtttatacaaccttctattcgagatttacattagttgtgtaatagggtgcattgttttatgagaagggatttacacattcaaatcacgcctgagccctagttagacattgttcataatttgtgcactagggtgtcctcaattaaataagtgttagacaaaaagcaatagtgtgcaggaatagttccccatagctaaaacgatttagacaatctttttatctttattttctttatataactatagccatatagaaatgaggctaatctattctttgttctttttatttggactcttttccgattcgtttgttagagcgagtgatcctgtcttagacttagacttttacaaccctgatgaagtgaaacttactttaaacgttgaaggtgattacaaggttgaaacttttgaacccgtgggcacatcattttcaaatgtatcagttatgggttctccactattctctggtcagaccgttaaggtgacgaaggttcaagcctactccgtaaagggtttgtgtcagttagtgaaggttttttttgatcctcctactacaccatatgctgtttttgagagatggacaacaagattttttctggttcagagacctcaatttgacactgatttaggtctgtttagacttggaacgtataaaaattacttatcttttgggctggatattaacaacaagaataaccctagatccctttattcagttaaagaagatctcgtagatggcgttgtcacccatgtattcacccctactttgtcagataccaaaattcacaagttactttttgacggaaagatagttttcgaatcaccaactgaaagtctaaccaaagttacagctagtcaaaagaacggaagttttgttttggtttctcttgatactctcaaaggtactttgactggtaaaaaatttttctcaatggttaacaacaactggaatgaagttgacgtttataaatacaatgaagtacttagaactttgcatcctgacgccgtagaaaatcttacattggatgtaaattctcctgaagagagcaagtacaaggtcgacaaggactacgatagaggcttaacaacggtcacttatactccgcaatccaaatatcacgtagttaaagtatctgcaggggggcaagagttatggagttctacattcgatagagcaactgaggtcgtttcagtccttttacaagatgaggtggtctccgttagggtaacaacaaaagatttatatggagcttcggtccatgtcaatttcaaaaaagtttctgataagttcgtcagactatctgacaaagaattctcagaccatctagcagatcttcaacaacaggcaggggagtccagaactgaaccagaacatcccacaccacacgtacttgacctatccaatccaagtcgtgacttcaatgtgcaactctcatcagaacaacttgttaaatataggagattgacccccaaggaaggcgttcttgtttcaaaggtgatgaatggaacaagtgaactgtgggttgcccctaaggataccactttggaatatcttaaagtgtttcttaataaggaaggagctcccgcgctttaccagttgtatgcagttggacctaacaacgaaccagtagtagatagcaagtacgaccttggaaataatctctggtgggtattccaccattcacagctgaatactttccttaaagatctacgtgatgctcctacgttgagtcatgccgtcgaacttgattttaagcctggctttgatttgcaacatactaaaatggatgaatattctactcttggcgtgggaaccacttcttacacagcagaagaccaacactatttcagtagggtcagttggaatggtctctctctttttgtcaaaaatgatcaaccaaaattctctccagtgaatgctactttatacaaaaaccctcagggggattttaggttagttgagcttggaggtttcaatgatgatggagaatggcacactgaatattttagatgggatggatcaagattcacccctcaaaccagggccaaattcctcgtcaattttgatacattgaaaaaatcttctgtactgtcaggagccggtgttctcggacaagaaccgtccatggaatctgatgaagaaactccatctgaacccgaaactctaccggaaactggacctgaaccggcaacattcgtttataacctagacacaagtgatttcgataataaatatgtttcctatgttggcggtgctgaaaatggatattacttcgactcatacgttccaagagatggcatcttgtttggtgatgtcaagggacctaacaacttcttatatacccacggaggtggcagatatgtcctcatggcaaaattctacattgtacatcaaaagttcttgggggcggtcctcaaaactgttggctcattgtatcgcactcaagaggtaacattttactatacctatgaagacgataaatggagctacagcacaaataaaacgcatttcgttaatgtgttggcttctgaacttagatattctaaagaaaagaaggaagaatatgagaaatatcttaagactgaagaggagtacaacaaggttatggagaagcttagaacaaaagaagagaaggctaaaaagaaggaagaagataaggcaaggaaagagagggaaaaagaagaagatgcagaaagggttaaagataagctcagcaagaaaactcagttatatagtgaaatggtaaagatggaagaagaaaagccaccagagttgcccgaagtaccggaacacactcctgaggaattagagcaaatggaacaaccatatggagaagaaaagttcactgttgaatcagaactgttgtactatgactttaaggctcctaaagataacaaactggtccacacaaaagacttccaatccaatggattgcctgctttggatgccactccagtagcaggtaaattcttccatattctatcatttaacggaaggagactttgggtaagtacctctacaagaaggtgtacaaacctacagctattttatgacgaaggtgaattaatgggagcagtacttagagtaactgtcagcaggaaaggtaaactcaagactggtgaagatttcgactacttgttcgtaacagaaggagaactcaaggtggttgacgttggagattttaataaattggcaaatgttaggttccaaagagcggcccttacccaattgtccagagcataaaatatctgcacgccatcgctcattctaaccagtcgagtcattcacaatctcaaaatgtactgcaatcaagtgtaacataatccccaaaccataatggttaatgatacgatagtccaatgattaataatgtacaataacacggtgtaatctaattctaatacagtataatccactaatggatacctaaaaatcgaatgtaacataatatttaacaataatctggcttaatagctcatacattgttatactagcgcatcagttatatgtgttcaggtcctttgaggaaagtaaatatagtgtaaaatgtatacacataagtaaattatcatgaatgatgaataataattatatatttatttaatttaggaaagttaaattgaatgaataattttttgagtaatatttttgtagaatcttatcaaccttcacaagctccccatccataaataaattctattaaatttaaaacacttatttattataatatatgtatttttattactttttaatttgtctttcaaaatatcgcaattgtaactttagaggacaaatttctcacatatttcttgactacacattaaataacagttgtatcatagagtaaattaaagtcagtatagatttttatgatttaatgtctgaagtggttgaaaatgagcctacagaggaggaagaatctgaggctcaatcaataattgaggagaatttttttaattatctcaaagaattagatgaacaagtatgggagagattgtttagagttaaagcatgcctggtggcactgtttagaagcctaggagaattggaaaagttaattatatatagattactgtacatcgaacagtcaataagtgaaaagccactcagactatggatgcgctcacactcaataggagacttgaagcactcacttacattattgcaatcatataagatcatcaatgtattagaaaacacaacaaatgatgagaaacaacaatttaagctcaatgatgattttaaaaatgggctcatgacactcctatcggatgattccaattacaaatattcatacgaattggttaaacttgaatcgattatggcatcaacaccaaaatcaaatgaacccatcaaaaatgctaagaattcagatcctgataatgttagtgaagatagcctaagtaaaacaggaggaaaacaggttgaaaatacggtcgatgaatcgagtgaagaaacacctagaaataagtcgaaaaccgttatcactatggctgacctggtaaaacacgcaaaactgaagctagactttattctgctatttcttgtctcaccagatgcaagaaaaggaacaatgattgtgaacaagctcttgaggaaaatcaaaaggctgaagaaacagtcgggggaaacagcaaacgacaaaaaaatcgaaaatttagaagccaagtttaatcgactttcgaaaaactcaggagttataagccaggatttattacaggtactcactctatatttattttaaattatatcttagctatcataaattaataacattaactttgatagatactgaggaggtttggaatggtagacccagccaagaagaattataagaccaccaagaccgttggaaccaagatgagtagacagaccctgagttggttactgaaggatgttacgagtcagatgacgtcactcctagttgggcacttgcagaacctggataacggctacctgacgaactgcaagtcaatgaacaggagttcagaagactccaaaaaatcatctttggagttgaaggaagcgtcatttaagacagtaacagagtctgttgagcttttgctgtcattgtctcaggccagttgcggagactgcttctcaactgagggcctaacaaaaacgcagcttaggctcttaagacttctcaacgaactaggaatagtctattacaagaaccctaaaaagttttatttgtacgatttatcgtatatagtggggaaaacaaatacaaacactggactgccaactagcaaggacctggatttaagtataaaagctggtaacgatagcagaattatagtgcagagtaattttaaagtgtatgtgtacacagcaagcccactccaaataagtgttttgagtcacctgtgtgaactccaagcaagaacgccaaacctagttgtaggagtattaacaagagaaagtgtacagtcggcgtttaagtcaggaattacgtctaaagagatcatcagatttttgtcacccaatggtatgaattcatctatcggaaaccaggaaaacacactactgaactcaacatttacctacagcataccagaaaatgtgtgtagacagcttaaaatgtgggaatctgaaagggatagaatagagttgtgcccgtcaatagtgttcaaaaggtgggaccaggattttatgcctgacctcttccaaagaacagtaagatgggctcaaagtaagagatatgaacttttttatactcagtggccatcagatccacactctccagaataccaagaatggattttgaaggaaaaatacctggcctgtgacttggaatttaaagatgaagtaattaaccaaattaggttaattagagctgatatttcagctgaaagacaggctagaattagtggtggtcaatgaagaaatttaaatatattgagataaaaatactacattaagtggaagttaaatcgtatttaagtcataaaatatcttcattaataagttggagttaaatcaagattcagttgaattctattattggactaggttgaaatttataattttattgagttaaatcttcattgtattagtctactaaactttctaaattcatcaaagttgttctgccaccgttcacgatcctcacgagacttgaaggtgaaggtgtacactacgttagatacagtaagttcaagttggtttatgttgtgggaagtggtcttgacctgagtaacttgagaaacaggaagctccttgacaacttttccggaatcttcaccacttttcggaggcatggaaagctccagttttagtccatcgtcactgcagttaactatgaacttcccagacttgtcaggcgacttcaccttaaccttctggtaaaggttaccctggaacacactgacacgctctgccctcaattccctggaaggcctctaaagaatcaaattttagttgtgaatgttttaattgtgaatataggataataaaactagaaaataataaactggatttaataactaaaagggattttataatgtaaaatagctgttttctggtaataatagggataaggatgagaatctaacaatcttttcttccttgtgggtatgttcctcgaaaacttcctcattcgttccatcaccaaacatttgagcaagtctcggaggataagtaggacgccttagctttttacgctcaccctcctttttcttctctttaagcgtcctctgcaaagcttgatcagcccttaaagtggaaacatctactgaatgctggcctgtgacctgaaatcaagtcatatttaagttattatgattacatttaaaccttgtctatgatgaaattgttcttaaatccgaagacgcaatcatccaatttccacttcacaagtccagtgatagaggaatcatagttctaaattaaaaataaataaaatcaatattaagattattaaatatctgaatgaaagatataatctgagaagagaataggataaaacatagatggaaataagataatagaaggaatattgaatgtacacagtaataataacaacatacagtgaagaactcagcaggaaaaagaggttcaccggtcgaacgggaagatccctttaaaggaagaatggattctaacatttgttatatttcacggaaaaaattaaagaaaacaaactaaattggtgggaaaataaaaaacaacgacacgcaagatgcaagagtgtgcaaggagtggaactttggaaataataaggatataattcacatttcacactttaaaattcttaaaatctctgctctaaaaattatcagggctggtatttagagattcctgggggattaatagatttgggtttcatgatctagatggaggaatacttgtaaaagagttgtttttaacacactttaccaattttatgtattattggtgtaaaaataaatatttaatttttaatcattggtgatttaaattttatgttttttaatctttggtataggggtgtacgaatgaggaccctatcccttaatacacaaaaccatgtaaatctaacttttttatttttataaccgatgttctcatatttcttaaaattttcctttaattttcctgtattttaatgtaattttagtataacatcggatgttcttttgtgtatttgtttgttgagtattttaagatataaatggccacttggtttaacagtcttgtggataatttatccgcaaagaaacctacttctgaacaacctaaatcgtctcagaatcagtcaggatgccacatttatgccatagttgtcatgagacatttcgcatctaaagaagcttgtagactctcagcagaatatgacttctcacccctaccaatgtacatttccaaaatctctagagaagttacagatttagtttcaaggtaattatcatttatacactaatattaacatttctttgttttatttttaatatttttacactttaatcaatttattcatacataaccacattaaaactatttattaactagtattataaccatatttagtatttgtaaattaatttggtttagaacgtgtgcccaggaggcattccctgatcaatccaaaggtgttgttatggagaataatatgggaactttttacgtaaaggctaccaatgctccgccaccaaaccaacttgttttcattgtcgcagttaataatgaatgtacaaaataccaagctttacagtttttacacgaagctattcagatttataaggtatcattaactaatattatcttatatataattaattaatctattttttagccttctggaaacgttgttagagataatgttggagacgctttaaggcatcccgaattaagatcactcatgctaaaatataaagggaaacgggacgtacttctcgacgctcaaaataagcttgacgaggtaaagtttacacatttaactttctattcaacctttattgtagactaaaatgattgtgatggataccattgatggtctaattaaccgtcaaggaaatttagacgaacttatcgcaaaaagccacgatatgacccagagcacagcaaaactcatgaggttattaatcactacacagttatttttaaacaaatatatatcatcatagtatattttaagatttattttttaaattataaaaacattttagggatgccagaaggaggaacagttgttgtcgtatgatgtgatccccagcacactaatttttactgtaaatttatatttttatttctgtatacatggaaaatagtactcccagcgcatatattactagtattacccgtaagcctgtcctcgtcaagctgaacaatggatctgattttaaaggtaattaccatttaggaatctcacctaatttttaatctaaattacgtttaggtactctagctagtctagatgaaagaatgaatctcgccatggagaacacttgcgaatttcttgacggagttatggtaaaatcctacggtgacgcttttatcagggggaataatggtattttttattttatatattttttaaattatttttgttatttgtaatttgttttaataatattttcagtttattatatcagccacgaccctaaagcttaacatttttaatgatttaatctaatgaatttataaatgtaacgtttatctaatgtgtaaataattttaaaataagattatattacaagcggttttccgtatatttcagtgcccttattaaattccttgggagagatattgaagaattcattaccaagcttcaagtaaggtgaaacaatctcaatccagtcttctatctcttcataatccactctgaagccttcccaattaaatacgttggttttgttgataatccaatttcccaaatatcttcttctgtgggtccacatatctataaaatactctagtctttctcctatactttctggtagtggttggttgtcaaattccttctcaatatcatccagttccgttaacaatctgagctcctctttaagattaatccaggacagtgttctggttatcccaatggacctaacagacttttctgtgtggatcaacacattctgaagtgttagtgagtacttggatgtgtgtgatattttgttgagcttaggtttagtaaatcttatataattttcatgttcaacattccacatcgtttcccatttaatgaagaagtcttgaatgtaaatgaatagcggaaaagcgtaaccataaaaaaatcctacccagcaactccacaatattagttgtttatcaagatttacaaactcttgtctatttgatttggacaggaatgctgacggcttatcttccatgttcctgaccactcttaggtgttccacttcattcatatatctgctcaatgcttcactcattttcttcaaatgagtaatcttttcagcattggcattttcaactaatctgttcaaatcgattaggtaagttaatctttcactcacttgatctactgagttaaactttttcttttttgtcaattcgtctatttgatcataggtcgctctgggatcaaaatgttttgggagatttttacattcaatgatcaaagtgtataaaagtaccgtcaagtataccagtccaaatagaagaaatgatataacaatcaacttaactctaaacttatccactctttcaacaaatgcactggacgtattcaattttagttggcaaagagatttacaaattccacacgcacaagattcccctgaactaacttgattcctggtttgacaaatctttggttcacaattttcataaagcaaaaaaagtttggtatgttctcggaataggcaacaacacttgtttgtttctccatttttgcagcagactattaatctattgtaaaggactaacgacgttggtttaacaaacttcattttataattaactcctttaagtctaaagtagttatttttaattgaacaatgcaagtcaatcctcatatcggcatgacaacaatcagttaatgttattccttgtatatcaaaaatccccaatttctcgaatttctcctctttctccaaccgaccatcaaaatcgacttcgtcaggttttatttcctttaaacaacaattttgagtttctccatttttgaaagctatgaaaactctagtaccaacatggtatgttgtttgagatatgtcctttatgtttatctttccgtctttgcaaccattgttattagtttgttggttcccgcaattacatccgccattactactcgcacatctgccttcacaagagcataattttatgcaacaacattttccgggaccacaattagtacagcaagaacaatttgtggttctgtcagtagaacatttgaaacataaacaacaaaattttttaccattacatgtgcattctcccccggaagctcccgatgtacataaaaaacacctggaatttccataacacttaccctcaagtcttactgttagttggcagtcacggcatgcacttgttgtaacagcgtcaagtgtgtatattccaatcaacttcaggcacttagaattattttctctggtgcatccgttttggcaagaagttgtacaacattgcgctaaatctgtgtctttaacaaatattattattgcacaatttccatccgggtcatactttaaatatttacattttttaataaatttagaacatataaatggcttggggaaacgaaatattggtgtatcaaatacatcatgcctacaataacattggttattgaacttttcaccgcaacacgggataatgttttcatttatcccaggaagtatttttactctctcttgatcagagcaagtttgaattaatgcgctgtttgagaatgctactaatgagtaggaaaatgtgtatcccagagcaaaacctgacaaagaagctaaggcgtacaaagtgtgtaaagataaggattggccaacataagcgagtctaacagaaagaataaaatgcgaaacattaacaaaaaatgtgattgagtagaagtttcgatgatttggggtctcagacgctggatatgcaacgccaaaacagctcccaataagctgagaggcccttataatattataaaggagtattttttggtaatttgagtaaggataatataatatgtggattagaggcgatttttttaaaataattgctgcagaaaacataaataggaaagtagttaccttgaaaaaataggctatataaagacaaatctgttctaaattgccttctttattttggctgtctgagtaagaaaacaccttttctacgtgccgaaataattctttaaaatgatcagtaattttggggaaatattctcgaatgtctttaactccttttgtaaaattttcttttatcccctcaaagtaaatttcctcctttgattcgatataaaattttgcctgtcccatagtgtgcttcataaggaatgatataaaacagaaaaggaaccttaataaagctaaactctcagaaaacgaccgcatatttacgtcgtggtattcacttttatttagaaaataccataaaatagatggtaacaaaagggctgacaataagccgttaataaaccatcctaacccggatttgtatttggagtagtatgagcaagagtatactataatgagtgtcattgaataggatatccctatagtgtgtaatgttataataaaaggtgagtgaattcgatctttaacaaatacaataatcaagaaatgcaacaccccaacatgtaaaatgaaataatttgcaaagttatctgtttttaactcaagtaaaaagtaacctaaaaccaagaaaacaataccaaataatatagaaaaaacaaaccgagaccttgccaaatgaattacaaccaaaagaatagtatatgagaagtagaaaatattaaaaataaaattattctctaggttaatgataccgcatcctattagtgttagaacggatgtggtaaccaatataacatactgaaacttaattgaagctttagtgtcgtagaataaaatttcgaattgatcagtgccaataaggcaagataggccaagtaaataaggttcaagaacgtatgaaaaaccgatactccttttcaccatcctaggagatgattcagtttcctattgttattgtagctgcattttaaaattgtttaaaatattctacaccagttaaatatctaacgactttcattgttgttgaaagtcgatcgtaatggagaattgactccccattcatgatattcgcaatcaatggtattatttcaactaacattcatttctagctcccagtattaaatcaaaagtttctctggtttccattgattatatccaagcgtatgaagctaattagtatcatatttgcactttaaaacaaatccttaattcaccagtacaggatcgttttaaaacattgtaccaacaatattatcaattaagtagcattatatttatcagtaaacgtcctctggaaatgattaaaatgaaggtacattcaagtgactgtgacaattatattagaatatgagtaataagatatctgttgagttaatacattgaaaataccaaattcaaccatattttaaagaacaattaacaacatagtccaccatcaatagttataaacttgattaagcggacgttccagacaacagtattgacgtctcgagataaattgctattaatattggcatatgtttcttcaagtaatagaatctgtccagttagcataatgtgtaaaataatataggacgttagcccttgaatagggagtgtagcaattcagataacatatcattattgatattctaataattagataattaagtttatttaaaaattaaaatgagaatacaatacggtacaaataaaaataatataggaattagaaatattttaaaattgattctaatatgtgtatcaactatgtaaatttacaccataactgaaatatatttttaggaaaattctagagaatttgcatttcttttctatagatttattgatttattttatttctacttatttattcatatatttataattctttttaaaaattatattataaatggttctttagcaaatttgctaagaattctgaagtatctaatacttctactttaggagacttcattactgtttcgggctgttttatagagtttgtgacgaccaccttctcaaaatgagaattgttaattctatccatggcggggcctgagaaaagtccatgtgtaacaaaagcataaacttttagtgctcctctttccttcaataggtcagctcctttaactattgttccagcggtatctatcatgtcatcaactaagattacgttcatcccatctactgatccacttatataaacagaatcaaccttgttggcttctgatcttgttttataaaccagtgccgttgtcgccattaattcgggcttatcctttagaacagcattgtagtcttgtgtgaaattaagagcccgtttttgtgctccagcatcaggagctactactactacattggttaactttaaatccaaaaaatattttacagcaactgagtgtactaaatgcgattcaaataaagtgtcattataaaagccagaacaaacgaccgagtgaatatccagagtgattagcctttgaagtccaactgcctgcagaaggagagcaacatcagcctaagaaattgtaaatataagaataaggaaaaatgatatataactgaatatatgaataaattattactgatgaaatgggagagcccttagtgtgtttatcagtctgccttgaataacataaatatggtacaacagctgtgatagtactggcacctgcccttttggcagtagaaaccatgagcaaaagctccataagggaatcatttacaggtggctgcgtggagtaaagaatcacaacgtttgaattgaacaaatcatcgcccatatccaagcttatttcaccatctgcaaatctagaaagtttaaaatcagtcaattgataaccaagtttggaagttatcagtttagcaaggtcttttgagtgacttccagtaaaaaaaagattcttcacttgatctgaagattttggagggggaaaataaaaaaccatgttaggaattatattaatatttaaaataaatgtaaataaataatggaatcatgataaattaaacaattatagaagaatgaatggggaataacaaacttaaatgtgtaagaataatattatattaaattatattaaatatatgtttaaacaatttcaaaataccattttagcttaataattattaaccaaaacaaattccagtctcatgctggaattaattaattctaacatttattcatatttagtcaatatctcacaaaatatatgacaatattcataatttaaataacatttcaagaaaacatgagttaatttagtcatacattacacacataaataatagtgtaaatattagaggttatacataattgagttgtaagtacttgcgatagtcagggtcaaaaaaggctctatttgcgatttgagctgattgtagcaacaggtgtctgggagtgaacctgaatagattattatcagagccccaaagagcttctgcaacaaaggcttcagcctcctgaagtagggacaccttacaatttttagcattgtaatatgtgggtctagaggtagagcttacattttcacctgtttcaacagaccaataagtgtaattaacaaagtttgagtccacagaacaaagaaacgagtcttcatcggagtctcctccaccgtcactactcaggttacttatcagctcgtagtcaatattagggtcatcttcttcaagtaaatccaagttcttagatgttaacaaagaatcttcagtgcctaatctactcaaatttgtgtaatatgaaggtttaaggcccaatccgataacatcctcctccaataaaatgtcataaactatggtactaaagtcacaatctaggttaaagttgtctgaaaatccatttggaatgtttgttaagtaattttcaagatttttagtattatttgggtcagataggctgaacttggagtcagagagctgtgcgatagatgatacgtctgaactgggatcatttgagtccttaaagttaagcagatttaagaatctatttaaattattaaaaattgaggtagctttgcttcttaaatcattttccatgaaaattttaagtttcccttcaatattgagaccacacggacggctgcgtctcccctaaggattcacaaataatattattgaatagattattattaaaaataaaaatggatcaagcaggtatgttaaaacttaaataaaatgatttttagaacaaactttatcaggtgaaaccaaaccagttgtgtgcccagtcgcggaaacaaaaactgaatgtaaataatagcacatataaattattagttaatcaatcatatctataattgatttaataaactccaaaagttattttataaacgtgaaagtacaagttttaaaaaatttatagctgtgtcggctgttacacaatcagttcatgttgaggcaaagactgagactgtcggtggaaaccctgaagatatacaaccagaaggtaaatacactctaaataacctattaaattctattgttcaaatctaaattcgctttagataaggaagctaagcaagacgagtacgtcccagttgtcgtaagaaaggagcctggtggcggatcaaattgtaagttaaaaaattattaaaatctttttcagtcagcttctattaaaaaacgaatatgtaccgagtgatttgaaacacgggattgaaaaacgataaatctcttgaaacaactaagaatgattaatgtagtggaatgaaatatctgatatgtacataatggttaacatagtttaactgtatattttatactttaataaaaatcattcgtaaaggcggctgatagtgcttcaaccttcttttcccctagtcctaaacaattatatttacatttattagaatgtattaaattgctaggtttataaaattgtacctttaaaatctattatagactttgggtcaaagtgcataatgtccttaagggtgttatacttttcacatagaaaatttacatcgttattatttaattttcttatattaagtaataggttgataactgactctctgtgtgacatatacgtttttttacttatcgtctctattcctctatagcggttcagattcagtatttcaactattgccgcactctctcgagcgttccaactcaacaatattttacatccatatccaaaggttacagttaacaaatttactgagtgtaatgtaaattcaggaacttacttagtagttgattataatcggagacatcgatttgacaaataataaacagatttttgattttatactgagtcaacgattcaagtctattttttatgtagttaatgttaactctgtggtatttgagcgatagaaatagcacgtagatatcgctggaaatgataaaatcaggagcaatatctccttcaatgtaagaaacattttttataaacctgtagattcatatttatatggtttatttacgaatttacctcagaattggattctttctctgtcgtggtgatattattaaattattatcatcatttataggattattattcattacaaattaatttattatgtataaatttcatttaaaacaacaacaaaacatatatataaaccttaatcattttctcgtcaccctataaattgaataacttttggcgtattcccaaaaatactaaaatgtgtaagttataaatataataaatcagcatgtatattttaaaatgttgatttttcatcttttaatcaagaaatttgtcctaatttacgtaataatagtaaacacattgtgtagtccggatatcgcaaaattggttagttatagaaaaataagctatttaggaggatgaccagaggatattacttgagagtctaaagcggagtaaggatttcaaacacgagctcgataataattttaagtttttggacaaaaacaacgccaaaaaggtaagagtgattattaattatattcattagagtttgaactccttttcctcaacaattcctgttgaaaacgaaggtttgatgttgtttaattaacttattttagccgatctaacaacttttgagactaattactctccgcctataatcgtccttctacctgaagattcaacctcgaggtaaaaacaacataaataaaagtttttagggagaaatgggagtatgctgtaacattaaagtgtctgggccaaaaaaacttcgacgccttcacaaatattcacaatacaagaatggctaagatggccggtaatgcatttaattatcttattttataagtgaattaataattcgttttagcaatttctggaaccacagttaaggagataggtgatgaaattaaagaaactgaacaggaacttcaaaaggtattaatgtaataaattattttattgaataggttagaaaggaacttgaagaggtaatggagaagaaaaaagaactgggaacagttggtaaaaatgatttcaccaaaaaaacacaggaattacacatagatcataacattaaattgttaaagcaggagatccatgttatggaagtaaagttggatcggcttaacaagagacttaagtctgccatcctatttggcaacaagtctcaaaataacaacgaatctgaaaatgaagatagttttgaaaataataatgaaaatgaagaagaaggtgaggaaatggataatgacgagggtggccgtgataatgaggatgaaaatggtgttgatgagggtaatgaagaggaaaatgatgaagaaaattattaataattaatttaatttaatttaacatttattttaatttacttattttttaataattttaataatataaccgatggaaggtatgatattttatacattataattattaattttcagaggttaagagcagctctaaggtagttcatagacctaaaacagatccagttaaaactcaattgagtgacccttttatgatagttgcttctgttggatgttttttttcagtatatctcagagtacggtttttatactataattttctgttctagttatataaaatattatttatcctgtgtgataaatgtttagtctcagtatttattgtttggatttttattatttcttttatcgatgtttttaacttcaagaaaaggcgcttttgggtttgcttcactaactcctttctacgggtatttaacactaccaatattttttcttcaggatgttgccctcattaattaaagtaactggcgaagtttttagatgcattgtcaatggtgaacctctttaattactcattacttcaatttaattactctactggtatataatatggatgtgtgtataatatatatttgatagtaaagattattcaaatcttggagtcaagcgaccattaccaagttgtgattttaattgttcttgacggtttttgaaccaaactcttccctcaatatttatatcatttgagtcattcggttgatttgacctaacctgattatcatcaggtttcggtgcccatgggtcattatcgtcagttatatatactggatgatactcatcatcttcataataattgtttgttccggagaataccaaattactaaaattcaattaatgtaaatcaaaatggtgataaataattatagtgtgaactcacaataagatgaatctgaaagcttcttcaggtgataatttaggcttcagtagctgtccaaaattcattaaaaattctttaaacaagatataagttaactttccatcatgagaaaattccaaaactaatgaaataatattaagacttataaataaatacctttattataggcctgtttagcctttggaggatcatctggattagaaggtggagttgactcgccaaggccaaaatcaagacaaaaacaaacaagttgctcctcggatagtacaaattcgccatcagatggaaattcctctttatatacacagaatattgagaacagtttaacctcaaattcagtctctagtgccaataatttctgcaacttttggttcctctcccttaggaacatttgcctatcaagctttttattagcttcagccaaatcattagtcaattgaccatttaaactgttcaactttgatagttcagactccttttcagtcctgtactggccgtactcacgctcaagattatcaaaatctaccctcagcttaccaaagtttaacttatatgtcacatattcattattcaattcgtctttttcagactctaccttattaagtctatcaatatatcgtgactccaggtcatctctcagcttaatttcacgttctatacgttcctgcatatttcttgtgtcttgaagaaggttttggtccctcaaaacctctaataaacgtttaaccaaatccgcgtcaacagtcccactgtggttcacgtggcaagtttcttcgataaattcattcttgttattcttcaactcgctaactgtattgctgaactctttagtctcaagtttccttggactttcaaacactttaccgatgtttgtgtctacaataaggccattttcgtgatatataactccgtccaagttttgggacccagttctactcatgttcactcccacatcctgccgattcaccacagtatcagtctggttaaaggcgtcctgttttagattatcaagatttaaatctaagtttgaggttaacaaagaattcagaagatcgttgaaggaatactgctcgttggtgtgtaaaactgaggcacggtactttgcaagcagaaacaaagccaataaaaactcctcaaactctgattaattaatatttaaatgtgtaaacctacgtagaaactcagtgttcttgttacatttcaggaggatgtaatctaaaacatcttcctttttcctggcattttgaaacctcggaaataactcaaactcatcaacctaacagtaatcagtaaggttaaattagaataaaagtaagtgtaattaaagtataaactaacaaatgatttgaatgatgagtgcgacaaagttgaattattagaatatttgaagaataataattcaaggggtctgtgtaatttccatggcataaaaatagtggttcctgtggcagggtcatctaatgtaaaagcgtttctgccataagcacagccatgtaggtgatcttcacgaactgatttggagtaattagtagaatgtccttctcgagaatctaaaattatctccttcaacttacattccagtctactcacgttattctccatattgatcaacaccgatttatttcagtattattgtataacaccttattacaatatataatattattaaatggttgttatacaataatacactgtgattttgaattagaaaacgatataaggtgagagcgttaactggaaagtattaaggcatatgagtgcaaaccggtaagattttcagaattaaaatgctattaacatgaatgtaacaatttaagtaaaatttaaatgattaaaggtaaaatattgagaatttttaaaaattaattttaaatatccgctgatcagttacacattttattgatttagacaatttataaaataacattgtttttaaattttttctactaaataatacttcattataataacattatttatatttatttgtggaatctgcctcatttttatctgaattctatcatttctttacatttaattcattatatggataaaccactattatctttgtataataatattaaaaatgacataaaatgtataaacttggttagaagattttatcgcacaaaacatcgcaagaaggttagtatagagttgaataaaccttccctctatgatcccaagagaacagctcctagtaagctcttgaaggctaatttattcacacctgaatcagcaggaccgcgagagctttctatgctctgtttctggattgttaactatggatatgctgactattgtattctcagcagatacgttcaatgtgcaattgacaacatcaagaaacttaagattaaaagtcttgctctaatttttcattccacttctaaattcatctataacaataccatatcatttatagaagcaagtcaacaaaattcacaatcaaacgaatctaatagtgagcctaaaattgagtttgatgaatatgtagaaagggaacaattgattagaaaatgtatgaaattaatcattgaagcatcaccaatactacctaacctgtttattaacgctgttcctaaggatttagggatgatttcattatcaattatcaatatttatgaatcatttttaaatgaatgtgataccaatactgagtctgctactgtcaatttagacttaaaatctataactttaaaaattaacaaactgcttcacaggctaagtgaagaaattataccaaaattgccattttgtgaaattgacgagtttgcagcatttgcaaagtcgttttctaagattaacactgactggtcaagacactttatgcgtgagttatcacttgagatttcgagtcttttgatggaaaaaatagaggatttggagcttttgaagcagaataagtacattggcgaggatttaattgaagaactgaacaagtttcccaaggaactttcaacagtaacgtgtgctctttcgaggcttaaaattaatgaaaaacggttctgggaacgttcagaaactctaatttcactaatgatagaattgatggataaggattttggtataaaggaaattgacataactaccctaacactactttgcacatctatgtgtaactataccaatgttactcctgtggtcatggaattacttagagtttgtgataaatcgcatcaaccttctattttagttggttttaacacgtgtgtaagatttctaaaggacgattctttatcttcaaaattcttagaattagttgatatggaccatgttatggaattagactcaaaattggtctcccaatttatcctaaactgttgtaaatccacttgtgattgtactaaaattattgataaaatttcttcattcccacctgatcaactggataatgaacttttatccacagtttatatttgtaacaaacagttgaaaattagccctgaaactaaaattgacctgtgtaacagattatttgagaatgcggattcattgcaaacaaacctattggtaacgattttattaactagtattcactctattgatgaagaatgtgttaagaatttatgtaaaaaggttttagatgtattgtataataggagtgaggaacttcctgatagtgttataccttcactactctctttagttttagaccattttcctggaaatttggacattattaagaggttttgcaagaaaattgacaattctgattttaatattgaggaactctcacatatttttactcaaattcaatctatgggtctgaacatcaacaagcttttcactaaaaacttcactaaaattaaggaaatcaatgacgtccagcatgattattcatttgatcctgaacagtcagattcatatgacaacagtttggaattgagtacaaataatgaatcttttgatatcaaatttactgaatgcggtcaggatgattttgatataaaatttactgaatgtgaccaggatgagataatgaaaatttctaaacaaacacttcagaaacctgaaagtgttccatttctcaacttggatgattttaaggatttaagaactccaaacaacactccccaatttaacgttactaagttcccaacaaattatgataataccacttatacacctgatagtagtgataaagttgtatttaggggattaccaaacgctaacactgttgatgagcttaaaacccagtggtcgaacttcagacataatacacactaatatattacatacactatatatatatatcatatacacactagtatactatatatcacagatactgatatatatatataatactaagcagatttaagtttatgttgtttaatgaagagagctccgcgtttgggatctccagttatagttttaaactcttgaacagttactgctccgatttgagagtttttctccttcttaaccttgtcgatatctgccacaatgacctggacattttcaaactgcttgtacttagagtagaatgacgccacatcagctgcgatttggactgaatgattatcatttttaaagtttctgaggattacatgagacccaggacagtccttggtgtggagccaaagatcgcctttctccctcatgtcatgtgttatcacctcattctgtttcgcattcctcccgacaatcatcataggagagtcgtccttttcattcacgggaacgtgtaatattttcccaaccttcttagtcttagtggtaacctttaacaccttcaccttctcaactttcttcttcttttttaacatcttgtatgtcttcaagtcatttatcattagtagttggtcatgaaagtcttccaaattctataccacaaattgtacacatgctatatttttttataaattatatactataatttgatataaatggttaaatatttatctatgtgtatataagttattacggataaattcttcacatcgttggagagtttaatgtctttgatggcgttttgataatcagaaatgttttcgattttttcattgacagaggtgagtttctcgtaattctcgtcatcctcacattgttttgcgattttttctagtttctccctaaactccaccgacaacttagttgttttctccagtaatctattaagtctgtacactggacttgtccctccatatatattatatatcgttccaatcatatcaacatattcccctaaaacatatatatatatatatattgtgtgtatagagtgtttgagagtaagtgactaaatggtacccttattatcaattatttcacgtattttgttgataaattcagtgtggaataagtttaagtctggtattttgtaaaagtaaagtgttgggtcaattgaaagcttagaacaaagtgatgttacgaaattgtagtcaatcccttcgtaaacatttaaaattgccttggtaatggacatattgttcaaatttttaaaatttaacctgaactcttcaaaggtctcatcaagcctgggtgtcttcttatttatcactggcaaactaaaggttttacccacatcaccgttattattaccctcagtattcttctttgggtcagttagtgtttctgaagacgccaaaacagtcccatcagagctatcaaccaagagtaacttgtttgttctgtcagatactacaattaagttgtacataaccttctcagagtcaactgcatctgcgaaatccattgaaacaacattcctaaaattgtagggcgtgtgtattttacttagtctcagccctgttaagcctgataacacgtgttcaaaatactccaaactgcgttcagtaaagcttctgtaaggtgctgatggtgtagggattaatggaaaaaacttgggactaaaacacagacacagtaattctcctcgctcatatcctctaaaatgtaaaatacacttatctacacccttttcctcagtatcctcaccattagaggagtctggacttttactttggtgctcaagtaatgtgcatcctatgaatgttgacctggtaaaaatcgtatttaactcctttgcatacttaaccaagttacagtataactttaggcttaaatttttcttcaaaacggcattatccacttcttgcagttcaactttatccgtccttatttcttcatatttatcaaagatttccttgctaacaccgggtaaattggttatattaggtgcaatatcataattatcttcaatagtttgagttgtaacttgtggcgactgactgggaaattgtgattttaattgtaaattacgtgttgttgaaattggtacttttaacggtttaaagcagaaatttgtacttagtcgattactaacgtaacataaactcttcctatttattagttttattaacattactatgaacacctttttattcatgatcaactccgcaattaagactaagacaggagtgagtatttgatatccttcggcactgtatcaattcttaaattattattcaataaattacaatatatccatgcgtcatcattactccagcatatatcattctacagcattagttatactattttaaatatacaattgcatgccaatatataaatatatatgtaagtatataacgtacggatgatgttgatttagtggtaatattatctaatttgccctcattaatcgtgtgtaaaaatgaaccgttagagcctgaagttagtaacaaatgatcatggaatgagttgtggagtactttctttacccaatgtccgtgtccagtgctgaaagagttcacaggtcttaacgtattcctcaagtcccaaactaataaaaatgtatcctctccaactgttaccaactcattagggacattaggattataatttatatctagtattattccgctatgatatcccacacttgtgctactacacaccttattactgtttacagatttatcttgattttgtctcagatcaattgtattgaagtaattatcaattgaaacagtgaataaatccttattatgtgggtcaaacttgccaacaaaataattactagagtattgatccagagggtctttatcacaagaataatttagctgctcctacaattgcccatattattaatatttattcattaccttgtaattagagtaaatgtgtaaagaatcactggtaataactgaaaaacgagtcgaatttaatgtagaatgcgggtcaacagctaatctaacaattcatcaacattaaatagaagttatttgataaataataattttaaataattaacgcactgtttaaatttcttgaacagtttatctccaacactggtgaaattatggctatttgcgttatccgacttatatgacaatagtgataaaaatgagcctaaaacttataacttctcatgaattttacccttctctgataaatttgtaaatgaaactaacaggtgtgtttcattttctgtcgagtaaaagtcggagatttgattaactggcaataagttgtttacaacactttcttgtgaaactgtgttggattcctcgtcaaaactgattatttccacctgaatacaatatatatttagaaaatacttggtttgagtctgaattttcaaatgttcctacgcagaatctatgccttttagagttatcgcttggaactgaaaccagagacttggaattcttttttaacacataaaatatactctcctcactcttgtttatattctgatatacagaaggatttaatatttgcattaatatataaactactcgctcgacaacaccataatgtgtaaaatattataaacatattaggaatattcgttaatgaatcatatttgtagactccacattgcgtttgtgtctgacccctttgctatttctataatattataaataaattattattgtatacctgttccgttagaaagatgcagttgttttgcgataaggttagcagcttttagggcgctgtaggatgcgtttgggctgttaactctgcagcagaccgcgttgtttcccatacttgatgcaacgactgcaagctgtggaaacgtcttcgaaactgtttgcacaaagacgttaagtgactttaaatcgccttcaaggtcatcgacagctgctctgagtactgcaggatgctctgaagtcttctctataaactccattccatcatacttctgtgactgtaatttctctaccacctccactgccttaattttagctatgttagccagtcttttttgatgtgcttttccagcagatacctataccaactattaatctagtccaaaaatgaaatagtctagtcaaaaaggataactaagttattataagtaacctgtaaatctatgagttcttcaaactttttcattaaatttctttttgaaagtagtgggagcattttgtgtacttcaacttctcctctaagagctgtcagtttggacatgttttctgaggcgttttctgaggcctctctcgtgtcatcttttgtgaagttgattggctttaaactcttctccaagtctcctaacctctgataataatttaacaaatcaattctgcttcttctgcactggtcattagttactatcgttaatcttctaactcctttcgatattccctcctctccaaccacagcaacatcctacaccatgcatactcagttgtaaattttaactaatatttttcaaatattggtataaataacttaaataatgttagatttactatttaaatctaattagataaataaattacttgtattgtcttggtgttggttagatgtgttccgccgcacacttctgtcgatgtgtgttctccgctaaaatcttctgagcccatctggacattaacaactctaactacttcaggatacttttcatcaaagtttgctctgattcctggaatctcaagcgcctttttatactcaatttctgttgttcttagaggtgctcctgaacgcacaaactccatcatcctctgctccacttgacggatcaaattatccggcaactgctgtccatacgagtaatcgaacttgagcttctcctcgtcaagctgtgatcctctctgatacgaactctcttccaatatgtctcgaagaacaaagttcagaatgtgggttgcagtgtgatttgatgcaaccttaactcttcggtgataatcaacctttaattcacactcatctccacatctcaacaatccactctctacaccattatacaactaatattatagtatataaataattgtatagtaaataactaattgtataatatataaataattgtataggatgtgagtagaaagtaccgtctgccaggcagaaatgaaagaccaggcctgagagtttgtaaactcttaaaacttctaaatcgttgatgtatcctgtatcatatatttgtccacctccttctgcgtaaaaaggtgttctgtcggttaccaaacagaccaaatcatcactatcatactctaattctttcagtatactgtcagcggttactatagacagtaacttggctttgaataccttacgtactggatcactgctatcccagtcgtactttagcttgtcatcagtgtacacattgttacacatttgcaatattgtgttaattctgtccgctgacagagatttcaaaagcctgtcacacctgctttctacactgttgaagtcagtgtagattctagcttctgacttctgttggtgtagtttcaactcagtataataaccaataacatccactcctatgcccaactccctggccattaacattgttaagtccagggggaatccataagattgatataacaggaaggcgtcctggccgttaataactttgacttcactctttgcaaccattttcttaaacttctcaactcccttatccaaggtttgcagaaacagcctctcctcatcaaacactacgctctcaatgttaacccgctcagttactaaattagggtacgcatgacccagtaatttagatacacttctgaccagcctatgtaaaaatggttcccgggtattaaaatagtctctgcagtaacgaaccgctctcctcaagattctgcgtaatacgtaacctctgccgtcgttacttgggtatactctatcagatattgccactgataagcaccttatatggtcactgactactctgtatgcgacgtctaagggagaatttccgcccttataactctccaattcaggcaacaattcacttatatacagtataacatcatttagcaagtccgtgtcataatttgagttagtgttattcaatactgaacaaagcctttccagtcccattcctgtatctacacatcctttcggtaatctttcgagaacaccattccgacttctattatactgcataaacactatattccacagttctacaacgttgggatcatctgcgttaacaagtgatgatgcgtcacggcctccaatgtggtcgtaatggatctctgtacagggaccacatgggccagtatcagccatctcccagaaattgtcttttgatccaaacggtaaaatacgattggaggggagaaatttaagccaaatttccctagtctcatggtcaggttcacagctgtcatctcccccaaaataagttacatataacctgcttgggtccagtttatacacgttggttaacagatcccaggcgtaagaaattgcttctggtttaaaataggcaccgaaactccagtttcccagcatctcaaagtaagtttggtgataacaatcctggcccacatcctccaagtcgttatgttttcctcctgctctgatacatttctgggagttgcaaaccattttcagcttcccaaactcagaattctcatcactcttacccatgatgatatccttaaactggttcatgccggcgtttacaaacagcagagttggatcattatgtggtagaaccgatgagctgggccagtgaacatggttttttgacacaaaatagtcaataaactgtttacgaacccagtcgcccgtgactttgtcgtcggttgacattttagacaaattattataattcaggtgatttcttgaagaaaatttattatataataaattattgtttataatattattatttacgtacaaaagaggcggactaaaaggtttataggataaaaaattagatttgttatgtctcagcactagtgaaaaacatccgaacatataaactaatattaaaacattaattgtacacgaaatatacatacattataatttttctatcctaatcaaaaagattacaaataataagtttttaatataattttcaccacaatttaggattcctctaatgaattgattttttatcatgtaatattttgtaaattatctcaaatgttaaaatttttaaattatttttcatttttttactaatcttatttaaatatcataataatagtaagttattaactgtgtaacatagaataatgtgtgaaattttttgatggaatctaaattgtacgacttgaataagttattggagaacccggtgagttttttgaatgagaactttcccgacgaatacagtttctacgccatagactccttaatatcgcagttggatgacgagattaggtctcaggatgcctccctgatcaagttatttgaggacaaagctgttgccggtgaccgcgtccatgagcgctttgagaaccttcaacttgtaacaaataaacttgaggctaagattagtgaaattaaagaccagtcacggaaaggtgaaagttccctgaaacttctatcatctgacatcagagctcttcacaatgctaaaattaatatatgtgacaccatcgtcaccctaaagaggattctcatgtataaccctactagttcacactattagattttgtatttatgtatgtggagtgaatatatgtttaggttctctcatatgttggaagacttgagtaagcatgcaaaggaaagaagttatggtgaggcgtctggatatgttgtggttctaaaagaactgagaaattctcttaatcctctgaagaaatcaccttcagtttgtaaattattgtcctcatgtgattctctactccataagctcagggagcagattgtagaggatcttgagcttaaacttggatttaaaatgatagacgcacaggttgaggaacaacaactacagttggataaattgtgcttgtgtgctgatttattggacgaatccataagaaaatccatctcaaataagtactcacaacacttgaagaacttatacgaaaataacttttatcactcatttgacctcaagagtttgtttaccaatttttaattttctatagccgtggacaatttaaatcatcgcttctcttggtttagaagaactctcaacgaatataatgtaaactacatacatagtattaactaatgtggaattaggagggagttggagtacatatacccatgaactggtacatttatgaaaagtctgcaatcgcatttgtacaatcactcaaatcacaactcatagtaattttttaattatttcccaatttattaccatattctgctatttttatatgtagatatttatatattattagggtaatttggtgtaggaagtgttgagtgaaacccaccagagtttaagtgcaagtagtttagtgtcatgtctacttcgttgcagagagtttgaagatgaactggaaaacaaatttacacaaaaccagtctaaactcagtggcgaccttgtggacaaagttaaaacagctgataacgttgaatttccagaagtgttaagtgaagtgaaagaagatgaaaagttggaaaaaagacctgaacttggcagaatgttgagtagttgttttgaaagttatcttgggccttggatcgcaagtgaagaatcacaacttgaagatttattatctcgaattatcagtgatacaggttgtgcatcaaatatttaaattaatttatagattcctcaataatgtttgtgtttgtatcggcacgtgagttgttctcgtcaataaacgcgaggctacaagtgacaatgaccatcagttctgagcaggcactttatgagatgtttctagtgttcaggaagataatcgcaaagtatcagcagcatttgagtggacgttacgccttggtaaaaaggactacggatttagaacttttggccaaggttactggaaacactattgcaacagcagactactgccttgaaatgatcgataaactcgctgatgaaattaaggataacatttcacacacatattccagcctcattacctttaccaatgaaaaaggttttccaacccaattatatataattatgtagaaaaaatatcagctgttaaatcggactcgtttaagctattgttggactttatgtgtacatttctgccctactctactgaaactaatttggacgtttcaggtccctctgaccttttagtcaagaacgaaggcctgattatgaagcgtttggaggtctctaccaagtaccttcccagcgtttacttgtaccatatcacgaataaaattgctcgaaacgccttggcccactttaaggactttatcttctcactcaactcagttactgaaattctcacccagcaactgctgctagacgctttcgaactaagacgttttctcacagacaaagttaaagaactactcgttactcttccacaaggtttggtttatactattttactgttaacactaataatcttggtttagggtatatggagagtatagttaatgaagtggataaaatagaatcaatgattaaagtgttaacaacaccgaataactgtaaagaatcatttgaaggtgttttcttgcttaatattgttttttagtatttttaaccgagaacggaggaccgtgtactcagcaagagctcgacatattactcaacattaaacgcttataattttatatttattaacaatgaacagtataattatatttaacaatgaacagtataatcatttattaacaatgaacagtataatcatttattaacaatgtgtgttatatatgataaaatatgtagcagaaaaggtgatgtaaaatttttgtagtgttatatagagattaatgcaacttctaacttgagaggtacgttacaatggccgctttgaatttcttacttttgtgggttaggtaggtcgtgggttcaaaacccatacacatcacctctccacgaccacctttttacactaaacattacatattttttatcattgaatagagataaattttataaaaaaactatcattctataaatcaaattcaagttaattagatttaactatcgtcaattttacactaatatgattgtttattaactcttatttattgatccagtaaatattaatcatgtagacttaactgttcacaattaagtataattagttaaattttaagggaagataaaacataatctaacatgagtatattacagcttattgcgctaatgtttgaatcccatcattttactgaggttcattcgcttttcagcgattttctgcttaacggaaaagcgttcactgaacctgcggccaatcccgtagtcgtgccctccaccaagttcccgcatctgagccttaacgtccttggggtttatagccatagtcttaagcagattaatcagcaacagaagttcctcgtcgttttcatctccgtcaaattccttaatcagaatacaattctcctgctgtagtgcacaagcagtcttgtcgtggtcgatcataactaccctatcaaggtcacgacctagacgagacaaatccttaatataactccctttgaacttcttgcagtggtctctatgaatacatccaatcactggaaggccccagtgattggcaatgtcatatgcgacaggataagcatcatctgaccaaatcacaatctcgtaatagttaatcagttccttgaagaaattgtctgcgtaaggccttttcttcactctccagcctaatttacggtcatactccatcttggcaattaccttatccaagtctaaaaccagagttggcaggtttgggggatagttaagctccttgaaatctggcagcaatggagtgttgtcagttggaaaaaactcctcaatcgtgtcataaacgtactgtgtaaggtcatcgagcacttgagagaacttcagtcccctcaaatccttacggcggtcaatgtagtaagataaggcaaacccactaaacaccaacaaagcaccgccataaatgccaaaaggtaaaaaacgaaacctctttaatttagaacctgatttaacatctttctcaggatcgtcagattcttgagattttggagattctctagattctgaggattgtgttgaattttgtgattcttcaggtttatgtgatttatttacggtattttgtgtattattagaattggaagactgcgatttaggatttaattcctggaagctggcatttttatcaacgaatttactagaatttgtgctgttttggctgaaaaacaacttttgagaatgcacaaaactgctggaatagaaaccagaacttttaacataaaagtatatttttctcaatattaatcttttcatgaatatttatactattttatttcgagactactgtaaactaacactaccatacgttaacactatagaatactacttaagattatttctgattttatgtggaaattttttattttttaatacatttaacatttttgctggatatttcactaaatatttattaaaatttatatataattacctaacacatatgttgtaaatttttaaaatttattaaattagtagtgaaaatgtagtttaaaatcatgttgaagatgcgtattggatgttagagaaccaaatgttatggttgagtttttcgagtaatattctgcccttgtctgggtgcgtgtttaccattatctgttttgtcaaatccttcaaatattgttccttgactcttctctgggttttcctaacttggtcaaattgcgatctactcaaaaacggcagaagcccagcgtaacctaaaaacggattccccttgtcgacttgttctccctctgggatatctgactccttaactaccttccctgatccagtaacatataaaggctgaggtgatggaaagaatgtttgaagccaatttttcttactcttttccaagttcatctcaatgtccaaattgttaaatagagataagaggattgagttgtaacactttggatcaattccaacctcgaccattcgttcagttttatacctccacatcacctcaccttcactgttaagtgagacgtccgtgtattttttaccacccaaaagaccaaacaacggctgcttagtcacgggcacattcattggaactgtgttgagcttgatccactcaaatttcagagaagttctcgaacctgttttattcaaaaaatcaacatccggcatctcatacaatattctcattattccacatatactcattacatccggctgtcttctcactaatattatacatataacactttcatccaagtttatattaacttcggtttcaatatttgaattctcaaatttttcaaaactatctgatttcactaaatttacattattctcagtagttacattgtcttctctatttaaattattttccgaatttacaatcttttctctgtttacattactttccaaattttccaaattttcgctattataagtttgattggtttgatatttaacaacagtggcatcgagtatactattgtcaaaaactggtattagcatcttctcaaggacaagttgataaagttcctgttgaatgtcgagtaaatagtgttgaggaaactgctgatgtgagaatacaagcggattgggcgttgggaagtaaaattcaatctcttctgggacttcaaaaatctctaaatcgatgcctgccaaaagcgcattaagtttcctgttcttcaggcaagcactcacaaacccgtgaccgcaaaagggacagccctttttctcctccaacacatacatctcgcaagtctcatcgtccacatttgatgctaaattatactccagagcttcgaagttctccatcccatccataatttctaattttacattatttccatcaatttcagatttaacacgaatttcatcatttttatcactttctctttttacataaggttccgatttttcatcctttggtatttcaacttttgtctttgtttcagtgttttgatcaggttgatctggatctgtgttgtagaaatctggtaatgactcgccgaggcattcttcaaggcagtttttgcatccagtacagccacagcgagctgaacatttaacaagatatggttggtttaatggtttgtgacatagttggcatattagtgagattggtagcttacgctttcccggtgttttaccgcctactgtgacgtctatatatgatttcgcctggtgaactataggttttgaaggagtccaagccacacgattaataattaacctagagccgctgtggattacaatgttatcatctagtggaaatagttcattaggtttattatcatcgtatagtgagattaagagattggttttccgggcaaactctcgagtcaaagacgactcctgagctattttaattttcaagtcggaaattagtattccggaactgctttggctgtgaagctcacgccatatgttccgctcactcccaaacctgtaaaatatacaacaatcctccgacattacattatttttataatatctttaatcaataaaataatttatatatagtgttagtgaaaatatttgagtgagatgtggtgttttagtataattaatgttaataaaatgtacaatagtaataggtgtagtcttgggatttattaggaatccgcaaagttattatatgaagagaaaattactctactctcaacaggtattttttatatccacctaaaatagttaaatttagcctaaaatttcataattatcttcaaaatagttaaattaagttggaaaatattaaatttatattaatttattcaagaatcctttaaaaagataaatttatacataaattattgaaaaatttgtaggaggaagagccttatagatttgttgatgggtttagacttgttgtaccctacagtaatgtatataagacgtttgtgaaggaacgttggcttggaaagcctcttcaaaaggtactaaaggacgaatttgcagcgtttacgccagattatatcaatttcgccattaataaaaataacattaaagtcattttacaaaatggtgaggagttggataatacctctgagaatgtgttggaccacattttaaagccaaatgagcgtattatacacgaggccattgtccacgagcctgtagctcttaactctaatataccagttgtatgggagaatgaagagtatatagtagtctcaaaacctacaagtattcccgtttatcaaactggaacctataaatacaactctttgatggagattatgaggcgtgaactcccctcgtgccgtgggattaaactgtttactattcacagaattgataaactcgtttcaggactagttgcctttgctaaaagtgccaactcagcctctgaactatctcaggctatcagggataatgaggtcaaaaaagtatacatagcaagagttaacggtgatttttcacatttactcaataattcacaccgtgatagtggagataaaagtgacgattcgttagaaaatgtatttgagagtgtaggatacatgagagtaattagtaaaaaagaaggaagatatgagtttgtgggtgagaatgccgaggatgagagttataagccctcagtgactaggtttaagtttataaaatataacaaggatcttgacgaatcactagttttatgttcgccaattaccggaagaacacatcaaatcaggtaatttactccccagttggcaactatttaccgctatcaacttttaattatttacccaaaatttgccatattatttattacccagagcaatagttattgtagtattaacattgtactagggcaaatttgagatatttgggtcatccgatttcaaatgatccttggtacaataatgaagagttgacagacgggagtaagtatttcaagcccattcctccaattaaatggtcaattaacgaggaagggaattggtgtatacctcagcttaattttaatgattccagtacagataaagttaatgacgatgatcacaagtttcacattggtctgaataatgaagtaattaatggttctagtagaatttgttctggaatattcttgcactccttgaggtttaactggttaaatcactttgatgtcgtcgattctcttccaaaatgggtcaacgatttcaacatttcaaccaaactaaatccaaccctttaacgtagtatcatagtattatatatagtatacattacgacgtgcttgttcatcctttttgtatttcctgattaaaatatgtttttaattgaattttatatgaatatataaaaaatgaaataatataattgtaattttgtacactataattgtatttgatgttgttaaattattttacattattttgtaatatagtaaatgtcatcaaggcagataagaagattaaaggagaggttaaaggaggaatcagatgaagaattggaacggaaattcataataagaaatgataggccaaagttctcattcacacaactcgaagattccagcgattccgacactggtacatcctcaaatgatgacacatctgatcattcagatgattctgataatttaagtgattctggaggttctaaaaattctggaagttctggtaatttggatatattgaacgggaagtctggaaattttaaaaatttgaaacaagatactcaatcatcagtatttttcctattttatcactaaatattattgttaaatttctattttggacttttaaccgagactctataattagttaattccatctcctatcccatatccatggtagtaattctatgaattttaggaggaagattcagattgggaaaagttattaaatgaagtaactgaagtcaacaccgagtcaatttctagttctgaacctgtttcaaatcatttcttatcatctcctcaacattacttcagaatcaaaggtattggaatacactattagtagcatatatacctgtacataatcttgaatagatatggataagaataagtatgtaaaatcgcatgggtattctacgagattctggctttgcccatccattaccaccaaagagtcaatgcagttgagacttttatcctccaaacttgttgaaatcggatgtgaaacgcatgataatcgggacagattcacacttatactctctccaacgtatttaatagctattcttgagattttttacagtaaatagttttcagatgtttctacttgtgtagtgactaatattgaattttatagatatcaagaagttgattatttaagttcatcagccttgaatacacaagattttgaactattccgctcactcttacattcaaatccaacgcatttaggactactcatacgctcagctctcattaacaccatcacagtaccacttaccaccattcatactattataccatagttacactgtcacactattatagtatatcatagttatggtatagaacaatcatgaggaatcgtttgcgaatttgtatttggctttgaaaatactacagaccattttaccacaccggtttaacctttatcgcacaaccaacttctcagatctcactctacccaatgttagtactctatttataaacacaattagtctaactaatatacttatttattatacttgtacacagttattgtatagctctttacatagttttaataggtatatttaccgtgcttgggagataatatagtaatataccgtctactaatattgtatatgatatcgttggagaggaaaggacagtggcagacagctttggcagtctgtaagcttttgttggcaatggactacccaaatgacacatcgcatgcacttttgcacgttgacttgtacctgctcaactcattctcaccagactcatcactcatccaattctcaaggaattacaactcaattagccctgaaatgcctttgttgtacttatttttaccaaacttctcactaacacttgcgttgcaagtgtacttggggatggatcttaagaggaaccagtgtgacttggaagagattaaatctcagttaccagccgttttagacctcgattgtgatcttgcagagctggctgagaatccaaaccctaacacgccttttttactattgatcaggtcactactccaattcccaatattcattgttaagatgagtgaaagagttgggacctctggtgaggtgaggaattgtgcaatgaaggaaccgttcagtcactggagctcagtacaggatcttggctacgaaaatccatatgatcaactgactcggtgttatgtgtacaagtgcggtgacctttggagctctaacaactcaacatttttaggtcaaacagcaaccatgttagtccagttgtaccaggataaggaggttagagatttgattaaccagttccaggacaattattttgatttcagaaatgaaattgaactcccggaagaatacacaaacgtatcaataacggaattcgatctcgcaaactactcacttccaatgctactcgacttccaaacctaatctcatccgattttatacacaattatacataaaaatatgtttttagcgtgtttttaacaggcttcatggtatttttaatagatcccgatcatgatctaggtaatggattagtgtagtggtgatcaaatggtgagatagcactagattaagcacaaataaagacttatcaggagggtaactacactactagagaaaacttaagggtaaaattggtaaaatgatagaagataaagaaggaagattgataaataaaggataaactttgtataaaatactttcaaagtaataaataaataaaaagggtaaaagttaccaagttaacccttaagtaacgtttattgacctttaaacactaataaatgtgatgtataattgataaacatagtttgaaatattacgaaatatgaaaaacaaaaagtaaacttggatgagtgatatgactggtttagttagtgtagtgaaagtgtgtgcaaggagaaatcggcagtaaaataagtttggagaataaaaaccctgaaactaagttaataatatgtaaatctatgttatggaatcagtaaatggttaaaaatatgtgactgtagtagtatcacaagatctataaattacgtaaataaatatgctaatgtatatgtatgataattttatgtttgtatgagaaaatgacacaaatttatgtaatttttaaaaaaatttagatagtatttgatggaaaattagattgaaaaaacgaatgtcataatgtgaaattgtagccgactttaatttttaatttcgataaatgaacctgatttttgcactttttatgctattattaaatggagtgatctgtatggacccgttggatatcgatattttgcaacccctgcctgaggaggggattgagacagaggaggtcacattttacggaatgaactataagatagtaattccgctgggccagtacttcttcaggacagtcagctacaacggcgacctcttgttccaggagggaccaagagcatgcatgaagatcgtcatcctaacaggggatacactcaaatatattttcctcaacataatacgggaggatggggaaaacataactgaaaggtacacagccttcggaaacgtctgcttcctagaacgcgtagcagctacctctacaaccgtcaacaacattattgaaataatgaaccagcaacatcactcacttaataacagaggcttcaacatgccactttcaaacattcccttcccaccagttggagggccagacgatgatcagggtcctgatgatgattcggatgatgatgacggacctccacctgatttaggagatcaacctccacaatttccgcagcctcctggtgataataatgatggtggaaatgatccagataacggcgagaatccggatcaagatcagggtttaggtggtggatttcagggcattaaccagttcgctcagaataacgattttaatccaaatatgcaaattgttccccctatacaagttgtagaggataacatcgaaaaccaggctgatttggaagttttagaagatttggaagagatgcttgggataggtgtgccaaacaattcgccattctttaatccgaacctgggggaatatgttaattttgggtttgaaccagacatggatataggtgaaaatgaacctggaaatgagttccttaatcagccattatttcaggaagatttggcagaaatacttggagatgacgaggagatgtttgatgtgaatattatagaaattgataatgatttacaagtagttccacagccttccgttcaacaagaaaatgaggaggatgaggaaaatggcttctatgacgactttgataactaattttaaatacctattaaaattttacatgatcttttacattttacattatacatcgaacatactttaaacactatagtactattaaattaccaataaaacttctaaataattaataaatctatgaataataatcaagaatatgtataataaatgatgaaagaaatgtaaaatgaataagattgaaaattatatgttacgggcacctcctttgaagtgctctttgtaatccgagttcctggacatctgccaagttaacacagaaactggtgaatgcacccagtgaggagaggattgaggcacctatataactgctaaactgttgctcattgcctcccacagccacaatacgtaaaccaccctctagcttcttcttcctcacgtattcctctacatccctttccaatattggtaccacagctggatgccttgtacaaccgccagtaaccaccaactggtccaaaaccactctactcacctccgaattcaacaagtcaccatagcattcggtcaacagtcttgataatccctttctgctatatactgagtccatatctacggagactaagttggtgattttagtcctgttatgtgtgtggtgtaggtactcaggtttggaaaagagtgtactacagtaaataccacaaagttgtttactattttcaacatctaaataattaccgtctggaagtgcataacagtatgcgtctctgccactagtgttaatgttaatttcctgatttaacactatgcaagtctcctttaacactgaagtcgcgtataaagctgaccaatgatagtagtcgtcatgtacaaacggtaatttcctgatgacaacctttgaatcttcacgttttacaggctttttacctgtaaatccctttaccactgtggtatcggcgtccgtggaattacccacaccgttggtactattttccgttttggggggtttagagtattcgtatgagggtcgaactgtgatacctgttgacgaaaggtatgaataaaatatgcgatccatgagatttcctcctgtaggttcctctttgacgtagtcctggagagtatacccctcaagtactggtgcgatattagagcaggaaccgccaacgtcaaccactacaccactagtacaggcacttgcatagcaagatagggctgaccttttacagagaaacacattctcaaccttaaaagtctcaaataataactcactaaagacttgtctgaaattcgggttatgtaatgacggctctgatactatcactggagtctcctgtaaactctcgtccatacctttaactcccaaacaaccgtccaacaaacgttccaacaactaataaacagattataccatagtcgtacaagagttaactaataattgactagtgtttaaataaccaatcgggttatttagacccttatatatatagttatagtatagtaataatgtgttaggataccgattggttgacttcgaaaccatcttgacggtaggttatggctgagatgggaacaacattgtcatgcttatctcttggatttaaagggaatatcgtgtattcaagtgggttttgacctgagcctcctgtaaactcgcataaatcgcctttagaatccttcatcagaggtttcccgatgactggggggacaaagaacgacgggttcttgtctccagctcggccaactctaaatgaaacggtaccaaaatctaagatcaagggtttctccattggatattacagtttaacaactatacaaaatcacataactaacaacattataaaatacaaaagaataagaaaatattataaaatataaaagtgaagaaaatattacaaaatatataatctgttcaaattatgtttaaattacataaataccgtcattttttcaaatatacacaacatcacaattagttaaattattccaattttttcattttctaaagttaaaattttctctttttaataaaaaaaataaattcttaattaaataaatgttttatcaatcatttatatttttaaaatagttatcatccatttacacatcttttatccacgctagaattttcaaacaattccctcaaaatactctaaactactcaatactccataaataagtcgtcatagtataaaaatagaataataactaatttgaattgtgaatgagttgaaaaattaaacatcctgatccatggcgagcattgatctgaagttattgggttgttcgagtatttcgacctcagagatgatgatgcgatccgagtgtgggaacagaaacagtagtgtgagctgtatgagcccactgatcacgcccaaaaagctcggggctatgacaagcatgtcccagatgatgaacccgtagcagaacatgaaaaacgagctgataaagttccccaacgaaatctcagtcggcatcgtcgacgtgtttctcgactccaatatttccttgaacgagaacaagggtgacaaatacgacatcgccaatagtgaacctaaacatattgaatcacagtttaaaattaaccaataatttggtattttaggtaaataaagcataagtaaagaataaataaactgtaaataagatgtataaatgcgtgagtggtgagaaattgactgaatgaaatttattacctccaatgagtccaactacggtgagaaaggtggttgaagttaaaatgaaaaataacacaagtaaaataacacaaagagcaaaactgatctttgaggaaacactcaaaataaacttctcattctggtccgaacaatacttcacaaacatccaaataccaatcaaatttattatagcacctacacaatttatatcactaagtataactaaaatacaaataaatcttaggtagtaaaataaataaatttaaaaagtagcggtaaaatagtctgaatgttaacctggaaaattgcttataatgagaatgacatttttggaaagaataccgtaaagtgaccatgaaagagatgaaacagctgaagtaacaaaatttaagcactttaaattcctggttgaattattcttcctaatggtaagaataaggttaagtggtatcatctgagtcaaagccgaagacaaaacagccccgaactttaccaaaaatctaaaatcgctggttataaattttaatatcttgttaaagaatgtttcggaaacttcttgttgatctggtggtacagtttcctgctgtgctggcacagattgagtctgtggagcttgtgtatttttggtatcaacattctttatttcaatggtcttcgcttcagtattggggatatttaaagtaattgttgcgatggtttcagtgcctgagggagtagaggctgtaggttcggcagcagggggaggagctttatcatttattccctcaacttggacccctttagtttcgttagtattggtagttaaattagtggaattatcatttagctttatctgtatgatctgtgtatcagcggttgtaaccttgtcacttttaggatcacccacattaacattatctgcgataattattcttattattactaatactactccaatcaacatactaaccacattataattataaaatcctcactattgtcatattaagcaaattattgctatgttataaacattattacgatataatcaacattaatataatattactgtagtatttttattcaaaatattgaataaaagacattaaaataagtttgatgaaaaaacaacaacttaagatttatagaatcaccacatcacaaatctttccttaaacgaggacacattttttgaaaaaattttaaaatcgcaataactaaaataaattgaaagatacaggtggtggatggaattattgtataatcctttgaagggagcggaaactacctttggagatgttcattttggctactttgttcctactgtaatttgcggaagaacaaaggcctttcaaacagatttacaactcttcatttccaattattgtaaccaaatcttccaaaacaatttcaacacttttcttaacgtattttttacgccacttctatatagatgtttataataattattttaaagtttgatttgttactaattttacattattaatatttgattctacctcccattataccaaattagcaattttaaacagagtatattagagtatggtatttttatttgggtatatgatgtgttatagagttgtttggattttggtctagaagggatcggtttagagtacaggaatcgtatgttttctaagattttggtcctttcgccaaaggaaaatctaactgatgtatggcaaattctctggggaacttggtcatgtacttttttatacactctgattgatttactatgcttatttaacactagataatgctaattagtgacaaatgatcagatatgtttaagaacggagtagaggagaagagtgaggaatacaatgttttatataaagtttctttgatatatttaatgttttatttatacttttcacaatcggattttaataatttgccaatccctctctcaataggtttctaataattacaattaactatataattatgtaaaatacacttaatcttactattcaaatgtttattacggttaaaacttgtagatacgtttgaggaatgtttaaagctttcagaaacagtgttgaaaaagtataaagtaacttcagttttgaacgttttaaagtacttgataaaccaaaagtgtatcacatttacgctcttggacggattacaatttctataccagaataaattcggagctccactcaaacctccatcatagtgtatttaagacatttaaaagtgtaaatggtttggtttggacaagtggtaattggtcctccggggagtgggaagtcaacatattgtgctgcaatgaaaagtaaacttttatctaaaaatcgcaagtgtattataatcaatttggaccctcaagttacattacatgagttgccataccagcctgacatcaatatcactaacttaatcgatgccgaacacgtctcaaacactctcaatctaggacctaacgcatgtatttcacactattcactattctcacccagttatacatctttaatcttatataacatcctagatatataattagcactattggaattgttgtataagttgattctagcgttgttgtattgtatggaatatttattcgagaacttggattggctcttggaacaaatttcactccacaagggtacaaatttaaatagcattaattgtaattttagactcttatttattatacgatttacccggacaagttgaactcttcatccatcacaatgctcttaaagatattatatccaaattacagtccaagaatcaaagggtaacaacttaattatacttatctaaccatatcctttatcataaaatgatttagttggtgcaaatgaatttgattgattcgacgttgtgttgtgacccttttaaatacgttgcatctttgttatcttcgctgagtagtcaaatattcatacagctgccgcacattaacgtactgagcaagttgagtcttctgaaggaggtggaggctgagatggcatacagactggagtactatactgaggttcaggacctccagtcactgatgatagcgctgaggtacaacttcaaactccctaatttgaaaaaattcgaacgattcacatcaactctgtgtgaaataatagaggattttaacctcgtgtccttccacacaatggacgttcaagacgatgaatccatcgaatttatactctccaacgcagataaagctgttgggttcattccctttaatcattacgattttagattcaactcctaagctaattttttaaatagaatatatttatggagtgggtattatgtgattgacatggacggacgtttgtgaaataaaaagtaaagaatagataatttaacatagcatttaaaggcatttaaactagataatgctaaacaaataataataaatagaaaaatgagtggaatcctgaaaatattggagcagactagttgtggaataaattggaaaaaatactaagagacttgaggataataaattttcggaaattttcaaaatattaaaaaattttatattaatgtaaaaaaattgatttaaaactatgggaattgacagaatttgcaaattaagtacttcgttgtcattgtagtgttgtaacgagaataaagaaaacccaaacgtagttttctaaatttcctgtacaaatgttgttaacatatccataatagtaatatttaatggttggacgacaaatggcttggaaggtgagggtccagaacacttttatgaacatacccgaggaactggacgactcagactatggaatacacaaatcactctctatgaacatcactcaaggtacttttcatccaatttattctttttcagacaatctcaacaaatggtatatttataacctacccagtttcgagaaccgcaatgattggaatttattacataatcaaagtaaccttttacttaaaattttaactactttagccaaccgctgagttatcttaactaattttaacattttaggcgacaaaactggtgtaaaatattttttaaaaccaacatcaatgttcaactactaccgggtatctaattttattccattaataacttctttaggacgatgattctaaaaatatcaactcgaatggttccactatacttccatctattatataaattaattaattattgtttttaaaagttaactagtaaatttttttgttaggttgtgtccctatcgatgagaatggtaatttaacatccattggttcagtcagtcacttattaaacgactgtaaacgtgagtttaatactttctcaacctccttagcgtgtgcgttttataaacaccggaccaagaagtgtgtgaatgggattcgatgccaattttgtaccttaccactattttactatagttaacactacactatacagttgtttgaaacatattattgtataatgattttgataggtcattttgagcatgatgagaggcgtaaaccgagggggagaaattttagaaatcaccgccttctttaatttttaacctttaccattcaaattacataattatctaaattaacattataaaaatcaataaataccaaacattaatcactctaaaatacataaagttaagtatataaagataaaactggacaagtaatgtaaataagtcacagaaaggtgatagcgggaaccacctgccatggtgaagtaaattaagtgtgcggcatttgtagtttaaaatgttctattaagtattgtaatcctccagcaactgaaaaacacaaaacattatccaatttcccaccattcaaacctgtggccaataatttcctcatgaattcagtggctattcttgaagaatttccttttctacacattaccaacagtaacacattggttgtggatttactagttaactgtgatagtgtaaggttgaacgaggcttgagtacagttgattagagtgttgaggggccagttaacagctcctggtaaatgtgaaatataataatgcgattcaggtctgacgtcaattaagcaaattttatactcagttccagaagtatccactgatattgataaatcattaaatgatattcttgtcgggcactctttgcccagttgcttaaagtatagatcaacgaattcctctggactaatagccaagtcgtcacgatcaagattaaactttaactcctcagtcggtgccatatacaactttatctcgccacctccacaacctaaaatatcattaatttaacaaaccgctatattatagtgtgtatagatggtatatatagtgataatagtgagttatacttttacaagtgggatttctggataattgtacggttttaaatgggttaagaggattttgagcgtcgtaaatgagcattttaccaggtgaaagacatttatcaaataatccagaacagatctttatcacttcagtcgcctaaacatatttaacacaaattaacattttaaggtaaatagtgcattacttgaattgtgcccaaaactcccggtaatgagcttaaaacacctgctgagctgcaagcattttttacataacttatgctggggttattcgcctcagggcatatacatctgaaacaaggtccagacaatctatttccaccacaattagattgtgtaggatgattaaaatttgacattttatcaccatttttatgatttaaattagagtcaattttacaattatttgtgagatttggaggtaagaacaccatgagttggccttgagacttaatgcaactggcaattacaaacggtttattatacaataagcaggaatcatttattaaatacctaagaaaatttttaaataataaatatgttataaataactggaaaacttgctagtatcatacttggtttgtgggttatctgaacaatcaacgatgacatcatatagtggtattatttcatgagcttccttaacattcaaataaaattcataagcaatacatcttatctaaattattatccagcatataaaagttaaatggacgaggatacgatgggatagtaactgagtagtgtggttacagattggttaatggagagaaggcgggttttggccgaaacagctttattcataccagtattacactcatcatgtatcacttgcctataagcatattattacacagttagttatataatttagttatatcagtacctgtgtaaatttgataactccactacatcaccgtccattattcctatcaaccctataccgttcattaatactataaaaagataatagtattaaccactaattgtgtagtaaaactgtgttaaaaagtaccaattcctgatgaagctaaatattgtaataaaggagagcctagaccgccagcgccaataactaaaactgcacaagaactgattgagcgataaatatcatcagagtgagaattagaactcatgtcgtgaagagcgatgtactgtgaattgtatcgttttgatgttttcatatccatacatgagcaatagggcaactctacactcttacatatgtttactcctttaacaccattaacattgttagtagtgttgacttttggaggccatttgggcttatttaataaaaaatcattaaaatcattgtgtttaccagttgtttggctattatttacattattaagatcgggggaagcagtaggatacttaaggcatccagaggatttatggtacttatcaacgttaattgataaatccttccagtcctcaaaatcaagcattttttagacaaattgaatcaaattcatacttcactaaaaataattaataaaagttacaaaaaagggattaaaataacaattataataccggtacaacaattatattaatagaataataattatgataacaggataatagtattacaataataaatcattaattaggcaataaaaataaaatattatgaaggaattgttcccgaatgaaaaagaaattcaaggatattttccccacagatgttatctttattaatcatattaacacattgttatgtcttcaatacatttcaatttaatgcgtaattttgctcactattcattgtgtagtcttccaaaacacataaaattttgttcccatttttaaaatcacgtgatattgtaaatgtgtaagttattttaattgaaatttgaaggttcgtgtaattttgaaatttttaaccttttctgaaatttcaccaatttttataattttcctaaattttctcaaaaagactaaatcgaccaaaatatgatgtgaattgtcttgtgaattatgccagatggattccgaagttttctttgaaagtcgccccaaaaagagaactttagattctcccaccgatgataccctgaattcgcccgttgttaaacagccgaatacaaataccgtttccaatacaaatacaacatcaaataatttacttggtaataccagttattctagtaatacaggtaaaaaactaattacactaatagtatactttgtatagtgttattcactggtatatacaactgaataccatatcatactgattcatagttgtaatgtgttataggtttgaatggttttgaaacgataagggtaagtagtatagagcaggaagaatattacaatgttgaccattctactgataagtcgtctttgacaagacagtttttgaacagttttctggttgattttacagaggatgagctggctgccaagcgcactgtcgaaaccatttacaatgccagccgctctttctcctacacatatcgcagtctacacgaagcttttttcacaaaatccacacaattaaccacacttttgcccttcgttaaggcaatctcctcagtagctgatacagctattctactctccacaatgaactccaagaactcctccaccaatactaataccactaacactagtaacaataaatccagcactaatgctaacaatgttaatggaaaggtggatccagtttccagtggagtgctgatgaattatgaattaataatgttggggattttccgtaaattttatttaaaattgcatgaatttgaaagtttggaaggtaataggacctgggagaaggtgttagagctgatggaagctctgttgaaggacggagtttttaaggaattgcgcggtttgttcagtcaagtgtataatatagagcagatgaactacggagattttaaacgttatttaactgattttagactgtatttaactcacttacaggatgagttataccctaaaagtgggaataaacgcaaattagcctcagtttcagagagtttttcactccaaaactgcattgactttataaatttcataaatcgcgagctggacaacttgagaaaactgcttctcaatgttgttaagcatgtcatgaacacacctgtaactgattctctcacctcaatcctcaataaactctcgaataattttaatgatcctgataaggcgaactctgctagtggtggtagtggtggccaagtggaggatgaaaagtgtatattaaagtgtgtaaatatgttattggaggaggaatcgctgttttacgtagtagacggtcagatagaacataatgtaaatatgtgtctggaaaaatacaataacatgtataaggcgtacgaggaggaagttaggaggcgttctgacgcagtatcggagtttgagaagaagaggaaatttaaacgtgactcggtacaatatgttctggaccgccttgccgaggttaattcgcccactcttgcaaacaactttaagaacccgttttacactgtcgggctctccccaaaattgtgtactaaggaatccttccgcaagtacgcaaagaagctgaaaatgcttctacatcccgacactgaacatgatgcagactggaagcaaaaggctgaaaaggcatttaaagaagcctctctagcactcgatcagtgtgttaagttgcttgaaactttctcagcctcactttacagagttggaccagctccgccatatctctcacatctcaacattgtcctacctccaaacagtacattttacacttctaccagtagtaacactactactaatgaaagtacccctagtgacgaggacacaaaggcgaaagaggtccagttagtatattttccagagtttagcctacgttgtgatgatcagaaggttggttctttgtcagttgaggttgatttaacatcactggtggataggaaaatatggcaaagtatgggtaaaaacaggcaaataataatgtatgtgttacgaccacttcattacgaaccttataccatacagttaccaagtgagatgattagttcaactcagaagttgaagttgactgacaaccctattaataaaaccccaatccttaaggtggaagcggtgcagccaataaggtttggcacttcgtggaagtactttgtgggagttaagatctctggtgagatgggttcaacactcgtatcttacaaatccttgtttatagaattaccttcaaaggggaggacgattaaccacatcactaagcttctgaagactttcaccaacgcctctttcatagaccagaactcgcttcaactgaggctcaacgccgttaaagaaactaacagtaaggctgaagccgaaaaattcctgattgaatgcacaaaattggcacaaaaatgggcagatgaaaattaatattcttaccatacacatttatactatgtatacatgtatgtgcataatggtatgagtataatagtgtgtatctgtgcgataaaatattatcgggagtcctgaagttataagattacaataacgaagttgaatagcaaattatatgttacattagtgtttaagtgagagaaaggcgtttttggtttcctggttattcatttcataggggttgaagtagtgaggcgccaactccatcaaccactcgcccttgatctctgtgactgtcctgatgtagtttttggaagtgtagatgaattcatggtaaataacccactgaggagtgtgttgcaaagttgttgatggatgtaacgcaacagcctggttatccttcaccaacaagtaatgccccctactactcttgtaagcaacctgctggaaaaatcccttcactaatccctttaccacagaactcaaatctttatctttactttcacctggtttaattatatcagcactgctggaagggtggatacgtgtgagtatagtaataagttgttgatagatgttaagagcacttgaaagtgatctcgggttgacgtaattatcctggcaatatcttcttactgaggaactggtggaaccaccggaagtagagttaacaactgcttggtactggttgaagagatttaagagtgtaatgtgatctccttcctgggctgcatattgggcctttgctgcgtcagcttctttagcatattctctgggccttacaaacacattaccacaggataacattgagacaacggcagtaagagaagtgatagagttaaattcaggggagtgaacaagtacttttgagagctggggctcgagtgggaactcagccatgagactgccaactgaggtaagttctccctcgtcgtctagtgcgccaaggtagtttagttcctctaaagccctcatcattgtctcaggagctggcggatccataaaatcaaagtgaaccaagtcatcaatacccattttcttcaaactcaaaaccaccgacgcgatgttagacctcaaaatctcggggtaagtctccgggactaactccttgctgaaagtggactcagtgtagagtctgaaacattttccaggcctcgtacgacctgctcttccggctctctgttgagcagatgcttttgaaattggggaaactaacagggactctatccttcctctggggttatacaccttctgcttactgaagccagggtcaatgacatacactacaccgtcaattgtgattgacgtttcggctatgttagttgcgataacacacttacgaccgtaaacaggttcaaaaactttctgctgttgcgcaggaggaagagatgagtacagagtcagaatagtcataggaagctcacagtttcgcctagcaagtgcagcatcaatctcacgccgagcattctcaatctcctcctcaccagtcagaaagagtaagatatcaccttcgggctcctgcatgtgaatgttaacagcagttctaacagcagcctcaaagtagtccctctcaggttcagcagtatagtatatctcaacaggatgcatggctccaggaatcctcaaaatgtcacatcccccaaaatacgcctggaacttctttgcctcaagggtagctgacattatcaccaacttcaactcacttctctgctttatcaagtccttcagtaacccaaataatacatccgtagctatagttctctcatgggcctcatctaactacacacaatatagtgattgcataatataaaatagttaaattgtactaaaaaataatctaaatacgaataactatataaaagatacaatgaccattccatagtgtgatagcattttgtcggttgtaatttctttcaagagcatcccgtcggtcataaaccgtaacatagtcttttctgaggatttatcctcaaatcttatggtatatcctaccgtagcgccgagttctacgtccatttcctcggcaactctggtagcaaccgacattgcagccacacgccgaggctgagtaattgcgattggcttgaggccagaaagtccagcatcaagggcaaactgagtcatctgggttgtttttccactacctgtctctccaaccagaaccaaaacctgattccgcttcacaagctttacaaagttcttcctggcactccatgcaggcaacttcttcctcccctccaacacattgtaatagtgttggctatatggtaagccggtccatttattcacattactctccaaatcattacttgtataaggtttatgttcagaaactaaggaatccttctcattattcaggtttaaattgtttaaattattgccaacaggattggaatcatcagaatctaaattttttattaattcttacataatataactatttatataatagtttagaaattaattaaattttaaaaaagcagaattaaggaggaaaatgttagagaaaagtacctggatttggagcatcagagaatcttgtttttctctttttaaccggattgtccatgttttaaattattaaaacacctatttcatcctccatcttttaaatattagaacaacaaaagaatataattatttaattatcggggaaattgtgtttaaaatcattattatattaattgtgttgattttttaaaaaataaagtatgtgttactatttggtccatggagtgaatggccttattattttaattatgatgttatcagaggggtctttgggttggtagatgatggcgtcgaacttcgttacgcttttgatgaagtagaagatgcacacaataaccacaaacatgacggaccagaaaatgttgaacagtaaaatgtatttgtagaggtcgctcgagttcttctcgtcgatgaaactgctcatatcctgcggaatctttccgtaacaaccacccaatcctggttcatcaaagttgaaatctacacaaatcatataccatctgggtataactattaataattgtgttaaagtggcatttcctatcatactagtgtacacctaactaagtagtagtaccgtctttagtgattgcatctctgtaagcattgcatacagtgacatcttctattgagcattttgaggttgaatcttttagtgcgagtagtacaattttcctggttatcaagtattctggatggttacagttccttatctccctaggcgttacattctcaaacacgatttgacaagctacacattattttactattataaatggtattgtataaatgattgtgtagtggtaggtatcagggtacgtatatttttatttaaaatgagtctgcagtttctaacggcgttgacggccgattcatcaaaacgatgatcacaccattgttttgggttaacgaaaatccaaatgaggctggagaactgaattgccaaccaaatccacataacaactgccgacacccatggaagccacttaacagtacagccagcaaagtgcataaaacgaccagtagtcacaaactgcctcatcgtataattcgaaaacaagttacacatacgagccaaatataccgataacaccaataatatagctataatcatatgaaactatgtgtgagtagtataaatttacccgtagtaaccgagatagaaatcatgaacaggttaatcatattgatactacgagcagaacaactgtaatttacaaagaacgaatacttcgttattaaataataaaatacagtcgttattagtaatcctataacattatattactattatttgataattttgtatatatcattaagtgaatatattaaagcaaaatagagtaaataattgtgatttagtggatttgggatgtgtaattaatagataatagtgatgtgtaagagagaaaccgatcattagaatccaactgacaagtttatagaaaaaggaagcgcgccaaatataacgacgcctggtccagttaaacctcaaagagtcgaaaatgcgaccaaatctacccttagcctttactgtcccagtcatttcacaattccacaatagattttacacatttggatattttcgattaatttacattttcttacaaaatcaaatacaatttttatgttaattaaatttagaaaactttattttttaaaaaattcagtataaaaaaattgtccagtcaaataatcacacattttttaaaatttttatttataaaataaattaagaataataagtcataaaaaatgtaaaaaataggaaaattaataaatttaaggtgagtaatgttattatcggatggggacagaatatatctaaaaattattagaataataaatttaaataatgttagtttgcatgaattgaggtaaatttgtataataatgatgttggtatggcaattcaaactcgttcaagtcatgattcaggaggaaaagatcttaaaaattccatcttccctaaccaaatcgtccataaacctcctagttcccggaggaacactaccaacaatgtaagaagtagtgatccttcaggagtagaatatgaaattggtgataattggggcaaatacgagattttacaaacaaaatggttaaaatgtattttatcagttgatttacaaaatgaaaatgccaatattcctgttagcaagcagttgcgatttctcaacaatgctattaaatatgttcttcgaagtattcccaatcaacaacgtatctaacagcctagacgatttaattaattacttaactcttacaatattaccaccaaattagatttgtatttcctaatatcatcattaacatcatttaggctgtaaattttttataatttttctgaaaaaatatgaaaaagatgctgaatttatagaccgtttgtatgtaattttaattcgttggtttttctgttttaagtacaaatttcgtctttcagaatttccatcattaggtaattttttcataaattactttatttaacagttatatataatgatatagggtgtgtatcagtgcttagtagtattttttggtctatttgcgctattggcactttgttcacaaatttcattttaactctatgtaatagctataactcaatgaattcggttgtaatgggactgattgggtatgagtctgagataaattcagacaatcagttgtatattagtgaccaggacattttaaagttgtttccacttttttcaaaatttcagacaaacgaattctctcctacttttcaccaactttttacctcatttctgcttaaattatattgtaagattagcttaaagacggataatagttcccataacttggacaaattaatgtgtaaaataaacgagtatgaaattaattcagtaactgatgttaatatatacataatgttgctggatctgtattgtaaattatcgttaaatgtagaggggttggaaagttttatccctttacatgggcctgcaacagtgtattcgaaccttctaaagcagtttaaatctgatgataagatgagtaatgaagtggtcaagggaataatatattcattttcgagatttttaactcgtctgttcccgaaatacaactcagtgagttctgttccagacagtgttttaattttaattcagtcatatttaattatagaacaggagaatagcgtaaataattgggatgatgagtgtgtatttgaaaccctcaaaagtgtattaataaatcatgaattgggaagagaaatattaaagaaattaaggataaactttaactattacagtagtaatttgccattagaaggcgaatcaatagacttgatcaattttatatacgaaggtataataaagagtagtggtattccaagaaacgtgatattgtattgtacaactagtttgacaaataaaatcgaggaaacttatgtaaattatgaattgagtagggaaattgcaaataagtttttaatatccctttttgatcatctacaacaaaataatctttcaatttcagatttatccaatgttataccaacaacaggtaattcacactattatatttatttacgtgcgattatataatggtttagataagaatggagtggatagaagtagtgtgataacgtgtgttttggtatcaatggcgactttgatgaatgatgagatctttgttgatggtagttctgactcattggtccgtgttattgttaacctcaagtataattatacacaggattccagtttgtataaactgtttttatcatttttatactgtgaaataaaggatgacactgtgctatcactagagtacagaaactatgaattgcaactttatagaactatagttgtacactacttgtcgcagcttatacaatcaccagttagattaaagcatttcatgtttgacgggatggttttggaagaaagtataattattgtgaggatgtttaaatttttaaatttcagaacaaatcacttgttaatggacagaattgtgtttgaaaagtttctaaccacaagatttattcctctgagtgatgttcaagggatggatgatgaagtcgagagtttaatatttgggtttttagaatataacatgaataacacaactcgcgaacagaacaatttgttagttaaatctgaagatttcgtacagaatgctacgaattttgatgtttacttttttaaaacaattctcaggtttatcactcagttcaggtataacagtaagaacgctactgagttggtggaactgttattgtacaagtaccatatgaagttgtgtagcaacaactactacgacttgaatatgaccaacagaatatactcaaatattaagaaattggtggagacaaacttgtatggccagaaggtcaaaaactcactttttgttcagtatttcggccctaatgaagattctagtgattttatcgagtcaaacgaatttattagtgatgaaaatggttcaaatcatgacaagttaaacagctgtggtggctcagtaacaagcactgatgtacaattaatagaactgctaaagttaaataatagatacactaaaagagcattttacactttaagtcacatagtttctggccatttagtgtcatttctgcctgtaaatcacatcccaacatttctctgtaactgggcctcttccctaccaattgacaccacaagcgctgtgaaaagcgaaaaaatagctatagcacgttttatcctctttttactcctgtcccaagtgatatcactgaagaatgaacttactttgaagatgtttaggactttagaacccataatctcagccattaatgtgatttacataaatttggagatcatccacaagggtcctaagccctatgcattttgtgaagtgatttcagacgaagaggagatttacactcccgagaggtgtaacttcctatcacaggagtcgatagagcttggcgacgataacttttatgagaacttggttaatagctacaacactttgagggaagattccttaaggaagtttaatgagaagaaagggaatataaaaaagagaaataaggaacaggtgcaactattacttcaaatttcactactgatttcacaaattttcctcaacattattttacatttgtacaataccattaatgatgctaataatggcttaattaccattacaggtataaactatgtttattaattatatctattcattgattatttacatgtttcagattatttacaaattatatttatattatatgtttgtttagatgatggagttgtgttgagttgtattggaaagaagagaacgttgtattataagactgtcgagtttttactattgattgataacactttgtcaacaatgatcaggacctgtatactatcaactttaaatttggaaactgattctgtcaagtctgagactcagaatattactgtaaaattggaaaattcacctaacaattatgtaaaccatcataacactttaaaacatgacacggtacaagataatgctttaaagcaggataacggtgctggagaacgtgtagattatatttataaggagaaaaggtatagtgaattaataaacaaaataaagaattttaaggaaaccatcaagtcaaaattagcctatttcaactcattccagaatatatacaatatgagcgttgacaactatgggagtactggtgatgttgcaaatgacactgggaacactggagaaaatgagctggatgacggcttagaggatgatttggaggattttatagattttgaaactgatagtcatttatcaatgataacatataatacgaataaacataccgaaaaatacaaggtaacactacatacgttagttatatgcctgagattaaccacataattatattaccttaatgtatgattagaacatgagtgtgaagaagaaattgaagatgacaactctacgaaacgagtggaaatgtataattaaatcacatttaatgtaataatatttatatacagattaatataaaatagttgaagtagactaaactaaactatatacaatatacaatatatttattgtgtataaaattattgagcacgggatttaagagggaacttgacgtaagaataaaagctccttcggcatactgggcacttgtcgtttctgaggctgaaaaggcatctggagcagaaagaaccgtggccacaaggtaaaagcacagtgtccatgtcgttagcaatgcagataaggcattccttatccttgacatcacccatgccgaacatatccctgggttcctgtgggcttatgtattcaccgcagaacaccacctgcttaacaacctttggcgatatcttagggctcgtaacaaatggaattaagacttcatttggttttctaaacctcactatagttatttcagcatatccctgaaaatacataaattgttgtattaaaagcgttgaaattatataaattgtgtaaataaaagtcaaaatatataaagtgtaatgaaagtacctgatgactctcgacgtcaccttcagcaaaaactctaggttcctgagtcctcggagtgtataggacaataaccaaaggaaccctactctgtaataactcatcgtgagatgttaagcatttccatattggcaaggtcttaccatcaacttcaataaactaaaacaaatgagcaacactatatagatacactaaatgggtatggtagtatatctgaggtagtaagtacctttttccatggtttaatggaacagctaattttagttcctgcattaaaacaaataggatcagaagaacagaaattatcctcgttacagaggagcgagatgtctccagagaccttataagtgtcgaaaaggtcaactggctgatccagtaacatctcgcattgctcgttatagaagggtattaaaagttttctaagcatttttttagccttatttaggactgtgtcgttgagaatggagagtcggaaggtatccttcttggggtttcttggcacaatggcagaataaacaatgtcaactggaacaccccaatgggcactcacgaatgttgttttagtacaatcgaaattaaaatttataaaataatcatcatcctcaggatttttctctaatttaacattttttggactactgactgaatttgcagtgacagatgtaagtttaagtgaattcgaattaagtgaaagtggcatgtgtattctagggatgggaactgctttaaattttcgtttaaattttaaaatctgtctaaagtggataaagtataaatttaaaatctccgatgtgtattcagccattccactcaaatggatggccttagggttagattgaaggtgttttgcgatgtaccaaatcgacttgtattctgagaggagaagaaatagtcgaaataacagaagcgaaagccccaaaacgataaataaattggaagaaccgtagctctgaagagccccagtccttccacagataaatctgctgttggccaagttcctgtaaaaataccagtcgaactcatttagaaagttatacattcccacttctcacaggatcctatcaatttccttctattaaaatatgcatgacaaatattatttaatttatttttatgtaaaaaatatgctacaattatatataaatatattataaactgatgagttgtgactatcgggctatgccgaagataatttttttaattttgtaatatatcgccatataaattttattataattattttttagtttggtttaatttatttcaattgaattatcataaattggctggtgaaataccacgatggctgtatctaagcgaaggaatcccgccgtcacatcaagttgtaagaaggatagtaaaaagaaggtaaaattagtcgaaaacataagagaaaccttggataaatttattaaaaataatgataactcaacttttgtatatttaatcgctctaaacaatcaaaggaactcgccactcaaaacactcagatcaatattactccccggaaggtaccgtctctcatattatacattttattatcattttttactttaagtacatattattgtatttaaattaatgtttaataattggatttagagtattctatggcaaaaataaagtaatgcgtatagcatttggtacgaaacctgaagacgaaattcatgacaatatacacaaaatttcaaatgtaacgatttttattgagttattcagaagatgctaatgtgttatattattattaaaatgtttgttgtagaatataaatggagaaaccgctgtattaataactagtgaaaacccagaggtggtagttaataaagtgaagggatacaaagtaagagatttttctaaggccggtaatatcgctactgatacaattgtactcaaggtatatcattaacattttacttaaatccaatccataaattacgatgtaatgtaaatgttcataggttgatggtaatgagtttgatgagattccaggtagtatggagcctcagtttcgacaactgggactaccaactgcacttaatatgggcaaaattatacttatgggtgattatacactatgtgaaaaggataaaccactaactccaaatcaaactcatctactggtactttttcaaacttttcatacttttgcactattttatcaaaataatcaattataatttaattttagaaattgttcgggataagaatgtcattgtttgaagcaaatgtagttggattctggaatgatggccattacaagcagttggcctaattcccaacattctacacattttctagccctaataggaatattataatttttatttttatgatatgtataatatttgtaatatttattaatttttgtactgcattcaatggaaatgttaataagtcactacagttcacgaatttggaaaatatcgtaatttcctagttaattttaccaccattttacatatattatatttctacttatgttaatttattataggtaaaaagaggcgtattgaaagtatgtgatttacaagctaaaaatgtacttgataagtgtaaacgccccttagtaagtgatcttccacttaattttccaactttttggataattattattattttcaaaatttatttaataaaattggtaaaggatctcttgtttaggtttttgtatctgaactggatggcgagttcgacttacacactaaagtcgccagaaccatctctgaccttcttaaccttaatctcgaccaaactaatgaaaggtataccatatacacgtattttaaaatacaatatatataatacgtgtggaaattacgaatttacacttatatcctaatctccattattctcttatattctaatcctatattctttttataatcctctttatacagattgtcatatgagattaagaaagaattaagcacagtgggtgcatgtaaaataacacatgactgtttaaacatcaagctccgcgatgagtatataatcgatcagttgaatttaatgtccgaaagtgatcgcttgaacgttggaaaactcaccgatgaaaccgttctagtcgactatttcagcccaaatgtaggcaaaaacttacacatgggacacatacggtcactgggaatagggcaagcaatttcaaatcttttacatttttcaggttattatactcattttaaacttaataaagttaaaattttatgagattttttaattggaattttagggagtaaagtaattcgccgaaaccatgtgggtgattttggccttcatagtggaataataatgcgatatattattgaatatgacaccagggccatggaagccctgaacccagcaacttgtgactctgtccgtttgagggaaacaactcgacagttagtggctgggttcagccccctcaacttcagccacgattacaacgtgaagaatttaacccttccatatccaacattcgcttacggactcgtactcgagacgatggatgactactacaaactggcttttgagaaattctcctcagaccaagagttcgcaaaaagagccaaaatcgagacttgcttgctccaaaatgaaaagagctttgcctttccacagtggcaaaacgttactaaagtatcacttgcaaagtataatgacctgcttgattatttttatatcaaagggctcaaaaatatccctgagagtttatacaaaaatgtgacaaataggtttattaatgaactaattaaggataaccaggttaaacaaaacgataaagaagttgtttataccatccccaaatcctcaaaaactgatgataatactgatagcacagagaatacccgtaatagtgacagtgctgaaggcgttggtgttaaaaatgaggataaaacggtattaataaccagagaaggaagtttgacgtacatgtctacagatttaggagctttgtcttacagagttaactggcataaacctgatagaattatttacgttactgaaaataatcaaaaatcccacttcaaaaaggtttctccttatcttaacttgttacatgcacagtattctcagttatatagcttaatatctgattagctgtataaaatatcaaaaaaattgaaacttttgaagaagtgcaagatggaacacgttggatttggccagatatgtcttgaagggagtggtaagataaggtctagaactggaaacacttgtacccttgacgacattactagacaagttgttaaactagtgactgatcacatggttaaacgtggtgattatttacaacttaaatctccagttctatccagaaaaattggtattttcatagtcatacccatactatatataatatttattaataaatattgtgtaggagtcggatcgatattatttagcgacttaagtgtggaaccgaaatcaggttacaacttttccatagaacgtttaatgaatcaaggatacaacttactaatctcaattctttattcatacgtgcggtgtcaatcgatccttaagcgttgtgaatcattacctcaaattccctctaacggtaacacaaataatagcataatatatatgtttagagttccgaaatgagtatgaacgtaagctgggattggtactgttgggatttgaaaatatcatagccacttccatatcattgagggagcctcacagagtgtgtaaatatctaacaaatttatcaagagagtttaaccagttttacgaaaaaacacctgtaattgctgatgataaggtgaattcactttctttaaagttggttaaaataacttcaagggcaatcgaaatcggtctcggcattttaaatatacaaaccgttaagcgtttatagtataataaaattaataaaatatgaatgttatgatagaacctaatgtttgttctgattcataaagtggttctaagtaatattctgtaatatactgtagtgtagtatattaatctttcttggccagttcatcacactccttcatgaacctcgcaagttggcggggtgtcatgtcatctatgaaatttggcttatcggcttctgtaaactcaggtggctcaaatttagaaaggtcgaaattcaagtcatacttgctgaaatagtgccagttatacatccagccatgaacagtctccagtggtaaactcttaggaggcctaatttctccctctaaaaaagaataaaatattatatattatattatactaattggtataatgtggataaaaatatgcctaaaaaataagtgaaaataccactggatatgtttaatttgtaattcttctgatgggtaggaggaggagtaacatgagtaagtttcatggcaatttgcagagtagagtctttatatacacatttaacatttctgagatcaatgtgtgaaaaaggtctgtaggctctttgtattctggaaagctttttccttttcttagggtctcctttagaaccgaatgttgccctctcccattgattcactatggtgtttttggggaaatttattaaaatcaggggcggctttacgaaatcgtcactcacgtcggcgtagccataatctggcttttccatgcgattaaataaatcattataagtgctgtgatatgaaaatttgtgaggtttctcccattccgcattctcaaaagtagtgtaatactcgtctaactcacttgattcaccggtattagtgggtaatatagtacaatcgccagtataagagtgggggtagtcgtttttggaataatttagaaatactgtgaaatcggttatattgagtcctggagcccaaacacttatagttaaatggggaataccttccctcaggagcattttagtaggattgaaaggggcaggaagttcaaacctttcgaagccatcatccggctcagtactggacaaatccgcctttttatattttactttcctcttgtcaacgcctggaaagttcctctttgtctcttcccgcatctcagcctcccactcatcgccagtctgagtccgtccgtccttggtataaaagcattcatacgatataatcgtgcggccgaataagccaacatcctcgggtacacatacacccgttctacttaccacattcaagccatttcttttactgggtgtggaaaaagtgttatgtgtattaatataagataaactaatcgagtttacagataagattattgtaaaaagcacataattatataaaaaaatggtcataacttgtggaatctacattcgtatgagaaatattgagaaaaagttaaaataatgatacacaatttatagaaggtttataatacaaattatatgtataatatacattaataattcaacattatttaaatttttaatgattatatagtgaataataattattagtttaaacaccactatttaataattctacaatctactttattaaatatggcttaataaattatatttttaagtatttttaaaataaatgaaagttgtggaaaatatgaaggttcttctagaagtaagaattacttttaaacttagtaaatgaatggattgactaaattttcaaacattcccagtacaaaatggcttcattttaacttcattacttcaatttataatctatacaccaagaataatacacacccaaacaggtattttcttatctacctgacaatttatttacttattaacctcttttagtaattatgtcagagaattgcctagactcgaccataaatccgcttttaagccctatgaaaaggaggaaaatgaggaaaatgatagtatatcacacttaccaggccgtttaatatgtcatttaaacaaacatagagaatcactcttacgtagtgacttgtactatggtaatattactaaatgggcctattatgggctcttttcagttgttatatataactggaacagtatacataaaagagagaagttggctttaatgaactcgattgttaagataataaggtcaatttcctataactcctcagaaaataacccaaatagtcttaatttggataattataagcaatcacttatagtgtttttaaagttcattttactctctgactcaaatactttgtctaacatcaataacacctcatttgtttctgataattgcattaacaattggaaatatgtatacaattgtattcacaactgtgtgaataatttgaacagttttgactcagtgggaaatggaacattcacggaattggtaaatgagtgtaactatgtaagggactttcaaaaactcttttccgtgttatattgggtcaaatctcttaaaattatttatagtcagctggaattactctctagtgcagtgttgagaaggcttaaatcagtatacgatgaggattgtgatttgagggatattattaacatatcatattacacatctatgattgaccctaaactgctatctgacgggttcatttctgattgtttattctcaaggtttaataatagatatcacagcttgaatgttattgactgttatcatcttctccactttcttaaaacttatcttaattatagtcttggtaatgagatacaatatacctttttacgattggcctttaatattctggttaatatacactgttacatcaataacagtggtgaattggatataaaagagttggaagaattatcaaataaaatattcaattacaaggtggacttaacctgcttaaatcagaaaaatcaaccaaatgaagataaaagatactataaattaagggttataagtaacttgttacaagaagtgtcacaagatttgggagttttaacacccttctgtattaaagtgtacaataaagttgttaattttttaaactaatgttttatatatttatcaataaattaacatttaatgttattagaggctattaaactatataatgagatcaataaggcctttaagcctaagcagaattgtgtgttggtataattcaaggttgattttgttggggatcctcttcatttcagccagaacagcctcatctgtgcactcctttagccagcggttgttgtccaaaatagtgattaaaaactccagtaaaaggttagtgttgtttatatccttgtttatttgatttgagacgaacttaagtaaaggtaaaatggtcttttcatcgcggtttctcactgccgttgatagcgttccccttaaaatcaataactcaattaaattataaacatgtgaagtcctacaaatatatattaatatactgtgcgggtatatatataatttgagtaaaaaaatgtgggttttaaaaataattaatgaataaatgagtaatgggtacgttagggtgagggctaagtccatagcagctttatactggaaagtcctaactagacgatctaggagtccaagtttcattggtttatatcccaaaacttctacactatctctcactgtgtctactctggctgtttccaaaccgttcatcacataacttccaatatcgttcccggagtcaagtttgttgttataacgtattagccagtctgacgtggatagccctacagctaaagcattattatacttgaagtcaaatgaagtgatttcgccatcaaatctatacatgtgggaaactttcaggccattattgatatcactgtatttgacggtgccgtcaagtgaagatgtgattaaaagattatcatcgtctgatagaaacgacctggtgattgccctcaaatgaggagaaacagtcagctccaactttaaacctgaggaaatatcccaaaccttaacctggtttcctccggtggtaataaggctaaaacctgaagaagatatggaaacatgttcaactggggagtccatttgaagtgttgtaactggcttttcaggtgttctgatatcatatacacgtgcgattttatcatagcaggcagtggcccagaggttgcaatccccagaaacgggagttagccatctgactcgatctgtatgtccgtttagtgttagtgagcatgtttcctgagcaacatcccagagcttaactgctgagtcgtcgccacctgttaggagactaagcttatcaaatgagaatgcgtggcagtgacaaggtccttcgtgagccatgaaacgtctaagcaagcttttcaactccagagccacaacatcaacgtttccagagtcgtcagaaacggcagcaagcttagagtcagggcggaatgaagcgcagcgtacaaagctcttggaggagttatatgtataacaaaccgtttggttttcgtaatcataaaacttaacctacaccaataatgaagtcgttttagttagagactagataaatttgaataatttagtccaaactatgaaaattaaaaaaaacagttaaataggtaaataaataaaaattgtttaaatatagtaaacgataaaatttaaataaggggtaaaaatgaataaaaatatttttaaaagttacttttgtcccaaatgaaatagaacagagatgatccgattgagaaaaagagatattagagatggtagaggattctttggctttgccgacgacttttagccatttaaagtaacttttaaggttttggtcctgttcggtaggctcaggagccgattgcctaagaccttctaccgctcggaccttgaaatattcgcccatggtggtcgagtaaacccgtttacggtgtaaaattttatgaaaaagagttgcgataataatttaataaatttaattagcataatttacaaaattttgaatatatcgtagtatcaaataaagatctagggctgtacggcgttcagtattaaagccactttacatgtttaattttattagttttaatgtatttttaattataattaattttttgtgttagttttatccattttgttcatttacagcttgtttaatctcgtctaattatgactgtaaattctcagattataattatctgtataagtgtatttttctagtaccttttaacactctgtagaatatttagactttttcattttatttttaaatctatatttctacgtctctattgcctattgcaatacattcaaattttttaatgtcaaatctcacttttctggaaaatatcagcaaaatatataacaaataacatttaaacatttttatcaaaaattttaattttaatatatataatcttttaaaatttgttacaatatctttgtacaaattgttacaaagccattcaattctgaacttttttttaataaagtaaaggatttgtaattgtatttaagttaatggattcccttctattataataataatgggattcttttcggccaaattcgaaaatgaatatacactcggaagaaggatattcaacggagtaagttttaatacagatgttatataactgtaatacataaaatagtcgattttatacgaatataccactatataattgattttaggctaaatgccaagtaagagaatgtcgtggaataaaagatgagagagattacgtagtgaagatatacgcctctgacctcgaggaggtcaacaccatccgctacgagtaccacctcttcgtaaagaacaaaatcaattctatccctaacgttctcagactgaaagattgcttttttgataaatattacgtttattacgttactcaacgttacgagtatgtttatatatgacttctgatatgtatatatggttaattcccattaatgaagtatatatattcacaaatgactaatttttttagaggacatgatttgtttcgtactgtgatgaatggtcacaaatatagtgaatatgatttatcgtgttatttcaaacagctgtttagatgtttgtcagctttacacggcatgaacatcgtccacaggagaataagcggcaagaacctggtgttcctggaaaaggaaaacaagacgcttctgctcaagggcctgaggcacatgctcagtacgcatgagttctcaaagttcaacgtcgtcgttgaacactctatccagtatctgtcacctgagatcatctcccaggaaatcaacttaagtaatattatgaagagtgatgtttgggcctgcggagtcattctgtacaccctactcttcgggaacaatcaattccctattgaatttccctacgaaaagtatgcccaaaatatagtaaagtgtgagattaactggtcacataattctcctctcctgacctcaaaactagcagttgatttttgtaaatctcttctcagaaaagatcctgatgaacgtttatctgccaaagaagcgttatttcatccctggatagcaggtaaatagagcatactattgtacaattatccatttattttgtgtaaatatattataaatgtttttaggggataagttgtatgtacataacacagaattagcatcgaatagattttatgcagaggtcaaaaatgcaattgatgagcttgatacattagatgaaaatacttcaatacaatgtatttttattgtttatttataaattccctagataacccatatgtacctacctccacattatttataccatttaacagtataataaaatgatgtagatcgacataaatttaatgatgaaaacccgttgaactcatctacccaactggtgctgaacaagtgtgtatctgggcataattttgggatgggaaagagtgtgagttcgaaccaatcgacactgtcgacaccggataccaaagataggatacgaacaaaatgccttccattcaaattcccaaccctgtcctttaaatttttcaaattcagatctaaaaagccggataaaaagccattgatggaaaatccagtggttgataaatatatcaaagatgatgaggcagattaacactaaatattttacacaaaatattttctacatgttttagatctaatatgtattatacaaaattttaattgtaaattactttatatttttagtggaaatttttaataatgatagatcagtgagtgtaggatataataatagtgataaataatgtgaatgaagacggaaaatggtaaaattggagctaaaacacaagtaaacgcctttaatattgaggcttgtgacctattgcagtcaacatttgctaaacatataaagaaaagagaatttatagattcagatcaatcagattcccattcaatagatctatcggatgagaataatgagaatgcggagttaaattcaatatcagaattaatttcctcagctctttacgagtttttgaacaatttacaaaacagagttaattttgacacatttaatgtcgttcaaaaatcactggattccatccagaataagctaaaggcaattgaatattctaaatggaatagaccaatatcaagtagatatagaaacgtgtacaatagactactacagagaaaatttaaccctgtgtatacaacaaatacacacaatatatcattagattatgtaattctatccaataaacttacgcatctaatcaacgtttggtcacaccagaacgcatcagatgataaccttgaagaagattcgacctatattgagcctccctcagtcacaattgtcaagtttgacatgacaggggaggtggtaataacaggaggatcagaaggaatcattaaactttgggaaatttcaacgtgtaaactaattatgagccttaaaagacattcgggaccgattaaccacatagatatacacccaactaattcatttattatctcatccaatacaaaaatttctacagacttgaataactgtgagatttatctctgggagattaaccttaatttatatagaccacacaaagttatatacaatcctcatgatattgtgtttctaaagtttgtaacatcatctactcttgttccaaataacacagaagaaagtggagtgaaaggagttgattggagagatagagagaattgggaaacaactatagaaaatacaatagtaacaagtttggataaaaataatgtattaaaagtgtatagaatgagagatatgatcagcccatcttcaggaaataacatatataacgaagttgcacccatgtaccgagtagatttgtttaaccatgagattacaggatttgatattagcattaactttttaggctcaagctttttagcagcgctgggtataaagcctttgggacttaataatgtgactggcagtagaaataccaacctcaattccatagtacattgtattaaaaatgatacattccacgataataacttcaatgttaagggaaaatatagaaatttaacagataaaaatgggataattttgttgaaaattccaattacgcagtcttatgatgatattgctgtggaggaaaggtgtgaatgcgattgtaatatgaagaatacagtcacttctgttaacatgtgtacattgtgcggtaaaagtaaatataacacaaagaatacatctgatattgaggtggatgagaatgaagtagatgttaaccaatcagggattagaaacaagtttctgtgggaatcagagcatagttctgcaattgaaaagtattttaatagcgtaattccagattttacactcgttaacccatcactattcgagtcattcacattcaatgtcccggttatgcattaccttaagaattcaagtaacttgatcatctcagcatttgtcgggaaaaggccgacttttgttaaggattcaggtgatctggacagtttgttcgtgaattttttaggagacgaatgtggaatttcaccacaaatacgattgtcaaacacgtcaatggactttgtgactgcttcaaaagataataggtttttcctatggcaatgtgaaaatggtgcatatgttccaaaacagctgcattcggatgatttaaattttgattttgaaagttatttttcatcttcagcgactaataacgtctctaatacaaccgcagatagtgtaagtagacctaatagtacgaatagaacgaatactgacaaacccgtgtataatattgtgttactggagtggtcatgtaacgataagtatgtatgtatagtagatgaattgttgaataaggacagctgtgttagtggtatggatggaataaattcagtgtttagagtatcatttttcacagattatgggaagtttgttcgcgaaaaacgagttaaatcacatattgttaaagttgggtataacccagtgagtgaagacctgtgtattatattatctcaaccctcaaatgttatcctgtataacattctaacgggaactgtaattaacactatttctttcgaaaattctgctaattggttggatgttcggtggcacccgatgggacacaagttcgttacatgtggaaaatatggatcattatcacttttttctaccgattcacaaagtttgatggatagaactcctaattatcagttgactttgtctgactataacgcgcatgtacaaagttatatcaacttcccatacagagggtttgaacctgatgacttaaggattaaaagatacttttcaagcttcgcagacgcacaaattactatggaaggagattcaacatatgaattggttacaaatgaactttttggagggccagttccatttctggatgaacaacttaatacagtactgttacacataggctccacagttcgtagggttcataaagtatcatacggagtaccaaatgataatgataataatgggttgatatatagtgtaatgatgagcctgggaggatttgatgaatactttagagcacacaattctgaaacggatgtgaatttattaaaaattgttcagcaatttcttcgcctattacacaactgttctgataaaaatgaggaaaatattaatattggtgttgattgtagtattgaggagtgcatagtatgtaagaatcatatcaataaaatggaacaacataataattacttgatgactaaagattcttacgtaacacttaggagcgtgactgacaagaatggaatagtgatactatcattaccgccttcacaaagaccaagtgactttgtggctcctccagaaagtgtacagtctgaagagatccacacccccagacgttactcaaacactgtagtaagcacacagccctcttcagatttacagtcattggttaattctacaagttctgaaggtgttttaacaacccccgctcgcacagtaacaattgatacagaggtcttggtgagagaagaggacgaagaagaatctgaggattccgattacgaagaatcgccagaagagtctgattatgagtcacacgaaagtgaagtgtcattaagaagatcagtaagaacgagtacgcgtagaattagtgaagtggaggaggaggatagtgaaaagtatagtttaagaaccaaaagaggatttaatgaagattcttataagattaaggaaatagactctgcaaagaagctgagtaataccataggaccaatatcaatacttaaccagaacaaacaagaagaattagacgaagaagaaactgaggaaatattctgtgtattgtgtggaatgagtagtgatggatactatacaaatttgacaagaagtcagactcagaagttctccagtacgttgtttagccaaggagattcatttaaccctggttgtaagttcttcgaaaacgcgattgtgggtccaatgaatatacacaggagatacagatcttaccttgaggactatcatctcctatcgaagcgccttaattcaaactgtaatatatttgcacactcggcctgcattattacatcacaagtcaaaatcgaccaatcaacaagattaattaatttcccagtaagttttatacattttccgttattttgtccccaacatattcataatttattaggaaatcctggttacaagcagttatgaaaagtgtggattttgtgactctaattttgcaacggttcaatgtgtagattgtagaagatttttccactatccatgcgctgtagctcagtataagggccacatgagatatgataaggatatagagattataaaccatttcgaccccatggtttgcagacgttacttttgtatagactgtggaactaagagtgaaaatggaaaacaagattatctaacaagtatatgttttcttaaaccggatacaagagattggctcataaatacgtcagacagttttgagaatcaatttaacgttcaagtgggagattatatcgttttaacaccagacgctatattcgaacgctataacacacatatcacctgggccacgcagcagtcatttcccatcctagttaaggttcttgacataacccatgttttttcaggtatttttatagttgtttatatagctatatatcgtaaacttggttaattatggttgattagatgatatgagtgtgactggatgtttactggttcaatcagtatttgaacaagttgaccctttttgtgtgtttataaccccagaaatcggtttaacactactgagagattttttgctaagtttgtataatctgtcaagtttgaaaattggttcaaaagttaaatgtaaaattaatggacaaataattgaaactgaggttaagaacgtaaaacagacttttaccaatggcgtaaatttgagtataaatggtgaaataggaggtgacacttgggaattatctgagttaaaacgagtaattgaagatttatataaaataggccataactctctaagtatatcatacgataagagaattaaggtaaatttatattcaaatattgattaattcagtggattaactgttggaacttggatttaaatctcgagattaagcctaaattagaagaagttttgagcaaaatcaaaataaagggatttaatcaacaacatagagaccagtttttgaaccttatccagtaaccagaatttatctataccatagttactaaacatatagtatattaattatgaaaattaacactgccattcatgattagggaacctaaatatggaatatttgagttcgtagaagaatatgggttgagatcacatgaatgggtgtatgagtattggcgttatataccaagaccaataagtttaaatgaaattggagaaaagattagaaatgacttttatagaacacctaaaggtgtttgggcggaaattaaactgttgatttcaaactgtttgaacttcaacgagtcgtcgtcaaattactcaaaaatagcaaaagaactcgatgtaaacctggagaatctgatgataaatatggaaagcgattgcaattggagtcatgtatttgaacacatttggcctttgattaagaatcttgtaacagcaggtgtgcagagtagtagccaaccacatcgaagaaatgaagtaaatcaaccggaacaagaatatgaagagtataacgctccaaagagaagaaaagtgaatatacaagaaccagttagaagaagtagtcgaatcggtcaaaaggtagaaaagcaggtagaagaagtaaaagtcaggaagaaaacgttatataatttgagatgacactatttttaaaaataattttttattaaataatatttatattttataatattcgtattatttttattatttttaaaaaatgtatattagaaaatgagtagtgaaattgaagattctaccgtagtagtaatcttggatcaaaaggaagacgaacttgtaggatttgattttatttcattcccggaagcaaatgtagtatctggaatttggaatctgactccaggctcacattttatgtacattaagaataaagaacaaggtaatttacttgatgataacattgtttcagatgattgtagactaggagagtttatacatttgaaaaggggtgaaattaaagtttataagagatcgcaagttgatgaaggttcattatttgaattagtggaggaatattgtaatcaaaaatataaggaatcgatagttatgggtcatttgaggggtaaaatgtcaaagattcccgaaaatttatctaatttgtgggcaagtatgacagattgtattaattctgaacttattctaagactcagaccaatcaataaagttattacaaaccatccttttccacaaaccagatcagatacttctgaaataactattgaaaacaacatgaactgtgatataagaagtgattgtgaaataagaaattgtacaacgagattagaactcagtgatgaagaagaagactattcaaaaacactggaggaatataaaaatgtagtaaataatttatcaacatttaaaagtaaagttgattttaacaaaattaaacggactgataaaactaatggttgccattttaaggaagtaaataagccagaaaatcatatagataatagtgtagaaaaggattatgactcaatatattattcagatataccgatgtgtgatgatagaataagaaaaatgaaggaaataacaccagagcaaatcacaaaaatgcacatggataccagctacatcatagattcaattcgtggtgataatagtacaaatgggtacaaaatggtagaatttaagaataaatatttctatgtgcttggagaattacagtacagttttctggttttcattttatgctttaattttgagagtttggaacaatacaaaagacttttaagggcgttttgcaatgctgaatcattactggttagtgaccaggaactaactcaaaaattgctgaaaacactgagatttcaaatagaaacctgggatgaagaacacgatgtgtatcagaaggataatttcttgacccaccacctgtgcaatttgcgtgaaatcatacttgataacagtgataagttaaaaacgtgcttagatcactttaaactgttggaagactctttcaaacttaaatttggaatatcgctcaatgatttgaacactatacactccaatataatataatcacaacattgccattatttatatattaaaaacactattatttgaatcaaattacaccattttgttttattttaaaataattatatgtattatactttggtaaaagatgcaaagaactgtatcatttaaaaaaaataaaaataatgttatttatgttggaaatttaccaaaacaactcactgaagaacagttaaagacatattttaatcaatttggagatgtcattaaaattagactatttaaatctaggaaggtatgaacaattttctgtttgcccatttaataacatgtatagactaatagatcgagaggatatgcttttgtccagtttgaagaccatgaaatcgcaaagatcgcagctgaaactatggataaatacctaattgacggtaaaagccttaaggttcacgtcaaagaaggggatcaaatagtcaagcatctatttaaagtatgttttacaaattcatgtactttattaaggattattattagatactatatacttgatatataaattcttttatatatgaaaatagaaaggaaaaaaggtgttggtaaaggagagcaaggtaaggttcttgaacacgaaattggagttggtgtcgagaaattttcagactaaactagagaaagtgttagattccataataaacggaaataaagatgactcgaaaaaggaaataaagtcttttatcaaaaaattaaatgtgaaaattgaaaaattaaaggataaacagaagagccttggtacagatttgtgtaacagagagattgaagtctattctaaggctctatcagccttaaagaatcatttaaattcataatttatctatctttttatttatttgttgtaatttgtgtatgtaactgtgggtcgtaaacattccatttaataaattaaatttcaataaaataataataatgtataatattctgtaatatttaaataaaactttatattttgtttctataaaatgaattataatgagaagataatccagggatttgcatcagttctttgcacagataaactgatatttcttggactcctaggtcctaactcaaaggtgtcaatttttaagtttcaagatggctcttttgatattaaattcgttggattcttatcgcctttaataggcaccgtaacgaagatgctttttaccaaaaatgattctaaactcatttgtaaaactaattgcgggtaaattactattagttattatgatacaattgtatataataataatatgaatctttaggtatatatatgtatgggatataagtgatgaaactattaatacattggaatctctcactaataacccactttatattgatggttatataccaattgactcaagagttacacctgtggcaattatcgaacctaataattcagcagattgtgctgacgttgaccttttatacaatgatacccttataggtattttaaaacggcttgtatttgctttttaggagttgaaaagtggcctgaattaaatataaatctatatgattacagcagaggaaacaagttaacaacattttcttccctcttaggagatgattttgacaaaaaaaagtatattagaagcttaaaatctgacagtcaattctcaacttttgatggtgttaaaggacaatgggtagcggttgggtctgattcaggtacattgcatttatgttttttgccagaatttgataaaccaactgaacaaagtgataaaagtgatgttttcaaagagcttaaagagagtctcaaaatatgttcttttaacataatggaaaatgttaacataaacacaataggttggagatttaggaataaaacttcagttaacctaacagtactatgtggatgctcagatggaacccttagatgttgtattctaaactctgaatcttcccagttaaagttatctaagaatgtttcctactcatacgcaaaagcctcaatttcaggtttctttttgtatattattagaactacactactccattattattttttggaaaattatattaaaaagttatatataataaaaggttaattagtggttaggaacggtgaatagaataatatgtgttagagattctaagacgggaacaccctttgttattggttcttgtaatattataggagagatagggaactttgagttcggagatttagccacaaactgtgtttttgagggcgtttaccagagacttgtgcaggatgtgtcagacgacatcgtctcattcgcaaaagtacaagacttcattactgatttgtgcatctctccacaaaacaactttgtaatcttagtatcctctaacgaaaatgtgtatctctgtcctgaaaatacacaatatgaggagagaggggctccctggaacaaaccactcaaactaaactggaaaactccagaattctccaaatttctcaataattaattttttaacatttttcattatattaaatattttaaagctttagttgtaattttagcgatttaaatttaatttgttaggcgttatacacatcatcaagtgatttatgacaaaatataaagttttgcttatttaatgttaggaagatgaaaatttgtttcagagttggaaagaataacagcttggctgttctcagaaagttaagaatttatggttccaggtacaagatagagaagattcaaaagttatgtgaaaactttgaaaaggcctgttggaggagtgttagagtagcagaagaaagcgcgtatatgcgaaaatatcacttcctcaaacattgcatgaatgttattaattcatatagacaaaataaactatacacaccttccgcttatgattccgaccctacgcgcttcaaactatcgcaatatattttaaataaatacgatttggacaatgctaaagcttgtttagatacggcaaacaaaatactaaaccttgtatttacctagattatttagactacctaaacacctctttcagtgttaataatatttaataggttacgaatgtcaatgacataaatgatgaccctagctctaatattactaaggaaactgaagaaaataacgatttaattaggcaattggatgtaacatcgttaattagaggaatggataatcaaacattaaaccaagatgtagaaaagctaaagaatataatcacaaaattagaagaaaaggttcaactacttgataagtatggtaaggatcctcacgttattggatactcaaaatctcaactagaatcaatgattaaactttaatatttggaatgtatatataacacattagtctttaaaattgtaaattgaacaggttttaaagttaacataatttgcaaacaggtaaaatgtcatttttgattttttttaaaatgtccttgtcgtgttttttccaccgcttgacttccaaatcagtgtaagtaaacttaacgagtaaattaaactccttttttgagaaaatcccttcaaccgaatctgaaggaatttttgccaatatttcaaggtcaaggtcaaggtcgttttcttcattctgggtgagtttttgttggtctagaatgtgatgcctgaacttgcgagccatgcgcaacagggttctcctgatgcagtatctagtgtacatgagagggacttgagggaacttgttcttgaagtcaacctcgctgagaaattttaggttgatggaattaggccttttcaggagcttacgcatccatctaaaacaaatcctagaaaccattgttggactgaaaccttcgtagactgtagtgtaaactttgggtaaaatggtcatattgaagtgtattctgagcctagtgatggaatagtcgggaaatttcttctgtactttggcccagggaacgttttccagtgataaattcttatccttgctcataatgtcccttacgatatcgtaaagtttttgctgaaaagcaggtgtaacctccacggtatcattgttagtattctttgatgagccttttgcctgccttctggtcatttttcctatcttggagatcttatcagcttctgaaagttcggaactttgaaccacagacttaaacttgtcaatataatgcttaatctcacgaaacttgtcatggatctgctcaggactcctctttaactgcttagttactgatttccaacagttgattccggactcttcattaagaaaataagtctttagaagagcgaacaattcttcattggtccaccgtccagtcttgttgtagagaatatgcctcctgaagaagttgtaaacagatctaggatggcgatgaggtaagacttcctgtgctatgtaaatcaagggtgaaggaatattcccccttttctttatcaatctctttaaggctgcctccctggaacacctatagttctctgaaatgaaatcatcaatagccttctttattttatcagattcctctttggtgaatttaccctaaaataatgagtaaaaagattacttacagatttaaaatcattgtcaaatttagtactccttggtgacgtcggagaattcctctctgacatttgcgattttgaaattcaaaaacacaatttaaaatgtataaaaacaaaaaattaaaaaatcatcaatattaatgaattacacatagaaattgttttgattcttcactacatccacatatcattcataaattatatatataatatgtattaacttatgattccattatcttttaatgttaaatatagaagatttttggtttctaataatatacgtaaatgtgttgattcaaagagccatttttgcctcaatacacaaaaacaaaatattcccttattgtattccaaaagttacctaaataagtctctaaaatcacgtttttatcattttagactgtattctactcaaaactcctcatttaactcaacttcaagtgatattcctatacactccagtgattttaagttcagtatttgggataataataaagatgattccattaacccaggtgatttatacctggaaaacatgtttaaccttactccaaaggaatggatgaatttaattagaatttctgaagataattcgcattttctatcacttttaactaattttcagagatatatccgtcatttaaaatgcagtgatcttgtgtatattattgaaaaatgtgtaaattgtggagttagggataataatcagggcatagacgtgtgttacgtcctactgtgtgagattttatacagatttttgtatgaaaataatcgcatattgaagataaaagatatttccagactaactaaagtacttttgaaactcaaattcaacagggaatcacctgaaacatcaactgttccaatatgtagcatgaattttgaatatactaaagaggtatccgtttgtgagaactgtaaactaagatataaagaccttttgaacctgaacggttctgacatatcaactcttttgatggtagttttggggaaatctctcctattacaatctaaggatttgaggaaattacatgaaaactcagttgtaccatatcttgtccttgtcggaaacaggaattcagttctatgttctcatttagttaggggaatttcatcgatgtattccaaaactttcctattgagtaattcaatacataacatttcaatactactccacactattaagaggaccaaggctagatcttatccacttgttaagatgatagtcgataggctttcaacaaagggtgaaattgagtcattacttagcagagaatcgaatttacatactaaactgatttcaatatcacaaattatacaattttgtataaactgccattactcatactccgaatttaacctcaaactcgatactctaattcactcaattttgaagtatgtttacggtatattttcgggagatgatatgaaagaaataaccaagttccccaactttgtatcgcaattaaatttacttagaaaatcaatgattttggaaagaattcatttgaaagggttaatttcgggaactgaaatatcaagttttctagactctctggagcacattaagccaacttttgcccccaatgaattcaagactagtaatatccactcccaagtcgatactatactcaagtcttttaattatgtaacgttgttggagcactacgtctgcccttacatcgttgatatttttgttccatcaaagaatgctgtcatagaagtcgatgggccttatcactattcaacaactctcaacccgaggtattaaaaaaataaagtataatattacacaatatacgtaaaagtacatagatataatagtacatagatataatagtacatagatataatagtacacagatataatagtacatagatataatagtacatagatataatagtaaatagatataatgaatgtttaggataaataaaatattaaagagagaagtagagaattatcaattgggatatactcttaatagtaaacttaagagtaaactccttaccaaatcaggcttcaaatttataaatataccattttatcaatggcctgaagctacaaatgaacaaatttacttcatatccaaccttaaaatttaatgttttatactacacattctgtttatttgtttgagttgtggttttctttttaagtttctgcataaacccctcagtagatggattcgctccattgtaggatctcctgaaaataaatattcatttgttttcaaacctggtcatgtatctaattttaggatacttctgtttatgatcggccttctcgtcatggaatttatgaatttcctcaaaaccttcacgaatccagatagatttgtctccaattagtgtattaactactttttctgtggttgtttgaggtttttcatcagacttttgcataaaacggagtttcctgaggtttgaactcattttttaaattttacagctccgaaacaaagttttaattaaattttatataattaatgtcataacatgtataatatattgttaaatatgattaataaatcaaaatttctgatatttacagacgatgtgggaaaacgagtttattcctccatgaaaccaaaatcgacgtcgaccttaaataatttgaacacattctggttgaattacctctgtaacactgtcacttcccttgatgagatcactagtttcagacgttgtttctgatgtgggcatccaggaaaccgttattccgtgtaatttacatgaatttagcacctacattaatatggtaatagtattatactatgtgtatagagacagttaactatgctaatgttaaattagtaaaatattctaaacattctggtagtaacataccctttgtgcaacatcgtgtgttttatattcaataactgcagcttcatatgtagttccatgtgatgccaacattgcgattttttggggtagtaaaaatttggagttgtcagagatccatttggctaagttacccttacctgtaaaataattattcagtgaaggttttaataactaagtagttaatacctttagcgcaatctggaagatttggaaaaaatatctttgtttccctgttatctaaactaatattcttgtcgaagggaggtttcatcaacttgttcttaggtggttgtctttcctgagatattaagtccttcatagcctttttaagcgattgaatcttctcgttggactcctggtactcctgagaatccttcggtagcttagacaaatttccgaccagagtctataaacatatatttataacttatttatactatttatagggtatataggaatagtatggtatatagatgacagtggactaacattgagttccttggtgtaatctgaaagtaattttttagcttccctgctactatcttctttttcctttaaagcttgattcattttttcctataaaaattaaacataaaacagtgttaactaaccttttggaccttaaattcgtccgattcatatctaaaattttctaggctagttttatttaaactgtggtcaaatctactattaaagttaaatttatttgatctatttcttctttgtggattaaagttgtttttgttaggaaaatcattcgcatttggaagcttccatgacatgttgcgaattctcttcctttgtgaagtttttagagtttcagactcatttccattaacagaaactggttctgtgttagttttatcaggagaaggcgaatgatgtcttcgacgttctaaaactttgtaaataatatattggaaggaaaaaatacctcggtgatgacgatcatctggcgagctacttgagtaactccgtctatcccttgaaaaacgccttctaggttttgaataactacgcttactcctggaaacgctccttctgtagcgccttggcgacctgcttctagaaacgcttcggtcggtactggaatagcgcctgtaactttccctacttagtgagcgcctcctgtatttataattcatatttttcctatattgaaaaattaacccaaaaacgcggaattttcctaatctttttctaactttatccatgtggtgagttgggtaagggcagctcataaattgtggtatgtttgatgtaattagtatgagtaatttggattccgatgcacaattatcgcacgaaaattttaatttaaactctaattctattagtattttctatggaaataaaattttatcaacatgtgttacatccacccctaactatagtaaaagctcctcaactgaggataaatcacactctgagtctgggaaatttgaatcttcagataatctgatgtcctttgagttaaataatggcgtagaaaatttttcaaaaggatttgatgataaattaaacggccttcaggaaaaggccgttgtaaataattacacttccctcgaacatgataggatcaaatacttgaaaatactcaatagtgttggtaaaccaaccaattcaggaactgttgaagatatgtgttacgaaactagcaaaattggtgaacaaccctccgactccaacagcgctaatgggctgtcaatattggaccttctaatgaacaatgataattgtttagatgatacaagtgataacgtttccgaagtatacagctcattaacctcctcagttaataggctaggtactcctgtgaggtccacgccaactgagttcattaaaaaatatgacacttctcaatccttaagtacaactgatattgagtcatctaacatcgatattgttagaaatagttctgaagagacttttgttactaatgaattggttagtcccgatgaaatgattaacactgacgatatggttactgctgaaagcgggcattcaacagataatgaacctgttgtggatgagtttgagcaattaattagctgcttaaaggaccctgagtattttgagaaattagaaagccaccctagtatgctacttctattagacctagagtttgataaactggtaaaactggaggagactctgattcctatcctcaaacagttacaggaagcaagtagcttttattacaagctttatgttatgaatgttgcattgcagataatggacgccaaacttaacgtacaaattttttatgataacataacaaatttaataaaagtagcttccgggcctaatactccgttcaaccctgataatacagagaatcgagtcttggaacagatgttcgtccaattgttgaacaacgcctcaagtttggtagaaaacctaggttctgatgacttggaacttttctttaagctcctttttcctttcttttataatttctatcccattgatacagttattgtgggtgcttttggagtttgtaaggaaattgttaagagatttcaagtagaacaagtaaagtcggcgttgaaattcataacgtcgaattttatattctttaattctcaactttacaacatgaccacacccagaagtaatgataccagttgtgtttcgaaatcgacgacctccgagaatagtatgaaaagtaacaaagaagatgatagcgtgaaaatatataccagagatagggacacaggaaacactaataactgctattatgtggagattatagtggtactatttgagcagatgttcatcaacacgtcgagaatagatgagaataacatagttgaaggtatcggagacgagaaggagtcgtacggaatattcaagactaattttaggaatttcgcaaatgatgcattttatatggaaaatgtaacatttaggaaccaaaaaatattttttcaaattttactccagaagctagagagcccaaaacacccatttgtatcgttaatggtatctgaattgttgagcatgctaattgcccatattaatggaaataatctgacaggcaagagaacaaatgataagaaggagtttaaagacgtaaagggagaaaagaatccaaggaaactacagtcccttaggttacttctggttatatcaagtcatatatttgaattatataacagagttctaagaataccgtttttggaccggcataaaaccaagtatttgaacaatttggattcagctaaaaatgatgtaaaaaaaatcacattggagagtattaaggagaatatcatgggatatttgaattacattagcataacagacgctacttcaagcctgaataatcttggaacttgtatattttacaccttccttaaagactactgttacattaataatgttcaggaagtgcagcaattgctgttgttccttaaaatttttaagtatttagcaattaacaatgttaatttcgatgattctagtggatcgcctacaaaaattaatgatatttttaacaacattaactattcacacttgttcaactatccctacctgtctgaagccaaataccacaacacccctgcacataggatagatgtgttaattcgtgatgtgtatacatataaaatctttcatgagtcctatgattcaatactggacacggttgttaatttaatatatacgaataatgagaatacaacacttaggttgtgtattgattttatacttgaagttgtgaccaagaactacgattatttattagataaaaatatacaaagtctgttgttggtttcattatcagactataatgtgtacgttagacaacaagttatcaatatatacactaattttctgattcatttttacaacaagacgtatggttgcggaaagaatgttagagatgatgatgagtgtgaggctgaacttcttaattacctgagtaaggatttgttaaataagatattatcatcaactaaggatttaaattataaaatcagactaggggcactgaaggtattacacatgttcctaagcctggtgaatgttacgcgatatttagatgtggtgtctgttttagcacaaagaagtttggactcgtacagagaacaccaacaggttaaaaaggctctatataacctgctgtctagcgtattctttatatactcagtacagatttttaagtctaattcatttcagaatactaaacataacccagagaataaattaaccggtaaagataagcttaatggtgaagagagttcaaatgataccgtatcgaaaaaaatcctgaatgaggagaagatggtgtttttggaaaagttaataaagatattgctatataaaatggagtcttataaaggaaaacttaaccctgtattgataatgttgaactactaccaaagtaataccgaagttatatttgatccaataggttactatggtggttatcagaagtctcatgttacaaggaagaatatagttagaaatgaccctaatttgagtgattctgagtcaatagttaatacttggcttgagcatttacttgatttgtttttggtgaagaggtctaaagggtcaagctactatgaactgtctgagaccttgagtgtgtttaagttatttggagaggtttacccaagactttttgtaaaacatctagtgtattttataccatatttgaagataataggaggaattaaactcgacgttaaccagattaacctgattattgcaattaacaacctcatcatcatagtctacaggtacattaaaaacacaaaaccgacaccaaatggtgatactgttaaggaagaagatgaaatactgtgtgagttgaacaatatagctaacaatgtggtcggcctggtcaactacaattcacccattttaataaggtcaataatacaactactcacgtataacaaccaggaacatgtaacgaagatatatgaaacatctttcaagtacctcaacaacataaaagcaatgttatcttcactcttgaatgttaacattgggagtgataagatgactaagttggaagtaacaaggaatattatcgaaaacaaggtcctggttgacgtgaacgtgtacaaatactcctggcagctgggctgtgtggctgagttcaacgacatggaactcaaggttttcaatctttttatagaaatgtttaagctctacaatggtgtgggtatccataatatttcaggtttgttcatcgagtgctgttgtcggtacctttcaaacataaataacctgttcaaagtcaaccacaaggagttgaagtcactgctgtcagacatatacgaatattaccagaacaactcctacaaatcaaataacctgatcctgatactgtatcagctgttgaacacataccagacattatcagccacgtcaggttcagaaggcccagattctgaaaatgataaagttaaccagggcaacaaaaggcagaaagaaagaagagacctagtcaacctaatgtatataatgatacagaagtatataagtgtgtttatgaagttaatagctacctattacaatgtagaagtgaagagggaaggtacagggcttggaaatgggaatgattttaataaagagttggtggatgaaaagttatttgaaggagggttatcagattctggagaggataaagttttgtacatggaaattatagagataattattgttaataggcttacaaatgttcaggagttgttgccatttgtgttcgcacagttacttacaccagactcacacgtgcagagagtggcagaaaataacttaaagatcataattaagcaggatataaacctattcctgggtaagatcaacacgtcttttgagactctttttgaaagtgtgttagaccaatttttcaaaaacgtttttgttctagggattacaggagaaaatactcatctagctctccaaggagtgtttagaatatatctagaactccttcaggccaagagatctaacacgaagatgtttgtaacgtcactactaatgcaaactaagacaatacacacaattgaatttaaaggcaggattgagaggttaataaggagcagaacggggattaattacgaaaagtttaaggtattgaaggagaagaataaaggaatctcaaacacactcaagatactagtagacaagatcagatctggaaaaggagaagagaggaacaagttacttctagagtattttctatatctgtatgcacatcttgtgtgtgtaatactagatgggctcacatttaaaaacaagaaggatgcagcttatgcaataacaaagattcgtgatgtcgtaaatgacaatacacacattttgacatcagaagataaaatttcaaaattcgtaaatatcagactcaagaggatctctaataaaattaagaacatttataaatagcatattaatctcctttccatctattattttctgtatacatggggtgtggaggagtgaatgatatccaattttaagatgccaaataaaaaaattatttaaaattcttttaatttccaattaatcatatatatttccaaagtatatattatatttttggtccgtatctgatctaattttatgtaactccagaaaacatctggtatttcaatgatgcctcaaaacaaaactatttaaattttaaatgctcagatcttttaaattaataaactagttcaacatggacgaaaacacagttaaagaaaataatcccccagatgctgataatgatcacattcagcttaaagttagatcaccagtaagttctaacaaaaatttaaaacttctaggacgggtccgaagtctactttaaaattaaaaaaaagacaaaattggagaagctcatgaacacatattgcagccgtctgggacaatcacccgaagccggtattttttattaattaatcattttcataaaaaatttagtgagattcctatttgacggagacaggattaaaggtgatgcaacccctgaagaactaggaattgaaaacggagatattatagacgcaatggtacaacagactggtggttccattaaaatgacaagtttttaatcatctccatgaattttttaattaatcaatttacaaaattctatttataatgtatattcagcagattggacattacgttcctggcttgatctttcagacccttgtgtgccttctattaaaagtttttttgatttagcactcttttatttgaatataatgtctaaatgttagttgtatgtatacttttggatttatagtttattttgctgaaaatgggagtatataaggacaaactaatccataaaataagattccatggaagtacttgaaattacatttcggatacttgtatttttaagttttattaaggtaaataaaatttttattaacagataattattattctttaggaaaggtgttacacatttaagataaacaatattaacagcggtaatatttaaagtattgaaatgtgattaggaaaattccacaagaatctttactatgacaagttttttagtaaaagtgataacaaatgtaatttacaaacacaaaatataataggtaatttaattgatttgaacatatatttaaggaatcccgaaggtttcatataaacacccaggatccaaccaagttgagtgggaagatatacataataggtcattgttgacagaacataaaattttttaggctatttagagagcgtatactgtttgttagtcaaccattagatgatgaatacgtgaatcaactcattgcagcaatcctatgcctggataatgaaacatcagaaaaaccaatcacactgtatattaacagccctgggggaaatatgcattcgggcttgtctctatatgacacactaaaggtaaaatagaaaatagatcaaatttaatcagcatgtccggtcggaaattgtaaccataaacgtaggcctttgtgcctcaactgccaccctactgttaggtgcaggaacgccaggaaaaagatatggactcaagcactcaagagttctattacttcagcctagcggccttgcagaaggcactgcagaacagatcaaaattgaagctcaacacatattagaaattaaaagaaatttagttgaaatttacaggtaggtataatttgaacgtattaatttgttcagtaacataacaaaacagccctatgaaaaaatcgcatcagatatagaaagggataatttcatgtcttcagaagagtacaaatcctacggattaatagatgaaattataacaaattccggcactaaactaatgcaaaaataaagttttaacatgtggaattagtgtttaaatttaattttcagattataactattctagtgactaaatcctatacatcagaataataagtgactcgactcagtgaacttaacacatcttaatcaaagtttacacactttaaaataactaattttgtaattcatttttgttttaataaacattgaaaagaatgatataaaaatcgtcaattttagctacttaatatgataaaaatattttgtgtgattgcgttcgttgtattatacaccaatatatatacaaaggtatatttttcattataattaaagcaagcaggtagaatcaaaggcaataaaactcaacacttccaacgtggacgttagttaaaacgaattattttgctggtcagatttcagaggaagatgtagcagcagatttagtaacacatgccgcagtacaaaataaaatgatgaagaaaagagaattcaagttcaaagttaagacatggttaagaaatgatagcagaatattcggattaaagtctaatacattcgaatttggtaaaacattagaataatagaattaatacaggtcactttcattattccagagtccaaatctgggcaaacaacttttgtaatatgaggagtaacacagtatcaaactcagcaagattcaaacttgataagggaaaagtagatttcttttgcgttgaagagatatatcttgattattcaattgtcgataattcatgcataagtaattgtggagacttggtgccatgtaacggaatagcaagatcatttacaaataaacaaccgttcagtatgagtttggtaaatgcacaaattaagaaaaattgtagtaagtatggttaaatttaaatgtgtttagaaatgacccaaattcaagaatcactagatgagttgtgtgatagggaaaattattctgcaatagttgatcaaaactttaatgttaagtgttattcaatagatgatattaatactgaacaaaacggactgtgcctagaggattgtagaaacttcgtatcatgcaaaagagtaccaaagaatattgatagaggaatattaattgatcattccaaaatagattggaatagtcttacgaatggttgtcgtatgtttaaatccatgtgaatacgtaattttttagcgtgtaatgaaaataatcaaggtgactatgaaactgcagatagctatataacctatgaaggatgccaaaatgtatcaattgataaatatgagtgtttgaattggagtgaagctttaacgaaaaatagtaccttatacgataaaagatttgtatttccaaataactactgcagagaagtacatggtaaaaaaggaatttggtgtttaacagatgtagataaattgtcaaaatgcacaccaaaaggtttttgttttgattttatgtgttgctttagaaattcaaaaggaagtaattcagcctggaactttgtttgatatttggatagctccatatgtgcccaaatacagacttaggattatatttgtagaaaattctgaaatttgcggagattttagaacacaaaacacagaaaatataattcggtcctatgaattagaagtattcaatttaaccaaagacaaagaagtggagaactacgaaaatgatatattcgagtattcagactcgtattttaatggagcttcatatgtattcaaggggtatttggctttagaacacatagaatctaattctaaaatctgtgcttgtatgtatagcacctattacgaatatgcaaacgggatgaaaaatccttgcgcatctaatgcaaattatacaattactataggaaatctagttgtagaaggtacgatcgtttgaattaatgtgaattaggtacgtcaattggtaaaattgaggataaggaagataataaaatttcaataataaacgtaaatcaacaaggctatggagtagtgtcattgcttaatgagtcagattcattagtttgtaaacagaccagattcttaaaacaagaactttgtatgaaatcgatcaacataattttagaaattgaaaaaaataatagaactgagaaaatatatgtaccagaaatgaataggagacctagtttgagaaataatgtaaaatctatatcaaggaaaacagtaagtttgaatgaaagaatagaatttgaagtggaaaaagcaggtgaatattctatgatttatgaaaatacgaacgaccctgataaaaccccttttattgtccatagattaaacattagaggttagttattattcattaaacagttttaggattttattcaaacaaaatatttaccttaataaccgacacgggaagtgaaaaaagattccgcgaacaatctctatttttcgaaagttggaaaataaaattcccgccgatagcagttgtaatatcaaaatatgataaagattcaaagttatgcgaaaagccattcgcatattcaataaacatttccccagtattggacagtgtaattgatacctcactgactacctggagagcatctgattttgaaattacaaaaaaattgacccaactggatactaaagttgaaaggtttgaagtctgtgtattcacacatgatttgaaaatgcaaactcttgggtttggaatatttacggaatttgttaatcatgagttaagtgaaatatacccagaacaagaagttcaaatacctcaaaacatatttaattataagatatacgatgaatgggatataatgagacttaagatttatataaatgatgatgaaacattcaaattcgaatccacgataagtagtggcaataaatttgaaagaaattatttcgacttaatcatggaattgatccaatcccaatacaaaggagggtttaatgacttagatattgatggatttaaaatagattataaacttcaatatccggctatattgagtttttggtcatatcctgatgatgacttagtcagtatgtgggtttttagaccaaataggctttctcctacatacattggaaagattaatgtaagaagcccattggcatttgtggcatacatttcgatgaataaattaataggcctagttttgactgagggcgaaccaggaataatgatgtacgagattgaagctgataaaaacaataaccatcacaatctattcaacatgaattttattaaaagaagttgtgatgagagcaataattcatgtacaaaactcgtatcaccggttgacatgaaaataattacctatagttttgattgtactaatagtcatttgatactagtaactgatgttggcctgaattgtataatattgtatgattctaccctaaatgaggtttctaaactgtgtggaggtctaggttctgtgcgtatatttgagcccacatatatttcatgcgctgacacttctaacgaaatgggacagtgcataaacactttggatggattcagatacgaagctgatgaaaattcaagattcattcagtgttttataacacaacctcatgaaggaaacttgttatgggttcaagttgatatattttacaataaattgacattaatagaatcatatgctggtggacaaatgagcgataccatttctgaatcacgcaaatataagaaacggtttattacaccttcattgatgactcctatatcagttgaaactgtttcatatgggaaaacaattttaatttatattgttgaatcagagaatccagctgtatcacttttaaccttggatttgggcagcgaattaaaaaagatttactattacggcaggaccgaattgaacatgatatcatacggaaattttgttcacatttcaaaattgtcgatgagcgttgaaaacaatgatgaaatggatgatcaggactatgtaatgctattcagattgggacctagaggaaatgactacaatagaagtggatcgtcatctatcaatatcattaatattaatgatactgtttttatcaacaattttgagtacaacactccagaatggatagtaattggagaagaattaaattttcgaccaaaaatagattctggaaacaaacaaaacctaataagatatgagttggatattttaaataatgagcatcagaactcgcaagaacagcaatcagatgatatgaaatatctgaaaactataaaaacaaattatgattggaatggtaacgccattcataagaatgagataaaaataaatagtgatactggaaaaataactattaagattaattatatttacaaactggtgctttcaatacgtgtgactgcatttgggtttatagaatctaaaagcacatacttaaaatttaaagtctcttgtaaagatggttattttttcacagaaaaagatgatgatgatttaaatgaggaatctaatggctgcaaaatctgccaaagaggggaattcaattcactggccatgataaaatctgatattttgaactggaaaaaatgtaccaaatgccccgaaagagaaataacaataagcgagggctctacttctagcactcaatgtttgtgtgcaccaggatatgaatacatatctgatggtactaataggtgtgaaccatgtgaagcaggtaaatggaagagctctgttggactgcaaaaatgcatcggaaatggctgttacaataattccttttcaaataaaattggtagtatttctgaagaagatagagaatgtagttgttatgaaggttattatttcaaaaatataggtggtgttaaagagtgtgtaccttgcgaggacggatatttctgtcctggtggaatacatggaaagaaatacaagtgtccaacaaatactacaaccgtagtgattgtgaattctaatggttctttcttaagattacctttgtcaattgatgaatgtatgtgcaaaaaaggttatgaaattgctgatgaaaataagttaattgatcagtctaatcctgaatacgaattaaaattgagaatacaagaagaaattaaattattaaatgtcgatactcaaaatctagatataaataacctaatttgtataccctgcggatatagaagatataaagatgttgaaggtaatacaaaatgtaatgattgccctgaaaatacatttagcgaatcaatgagtccaactagtgttagtgattgtaatttgtgtgacaaaggttattatgagacggaagatgtacaaaatccttgtgaggagtgtagcgaaaatcactattgcgtgggttctgatccgataaatgaaaatgtaaaaatgtacgcaaagaaaaagataaagtgtgaagaaaaatcaataactataaagccttacaataagaatgtgagtatgttgaattgtctttgtgttgagggttatattcctgtgacatctggttcatctgtgaagtgtattcctgctccaaaaaaccactacaaagatgttgttggtaacgttccagctgttccatgtcctcacggatctataacattgtccaatggttctacttcgaaggattcatgtgtttgtgacaagggcacatattttgattttgttactaaacattgtactatttgtcctgctggtaagtattgtttgggtggtaaggatgatgctatgaatgatagacagccgatggagtgttcagattccaatgctcaaactaaggctcaaggtgcatcttcatcatcagagtgtgcttgcaaggaaggatattatatggatgttgattctcagaatgtgtgtaaggagtgtcctgagaatcattataaatcttatatttctaacgataaatgctctaggtgtgatgagaattcatctactactggtaagaagggtgccacatctaaggagcagtgtgtttgtgaccctggttattactttgacaaaggctgtgtttcttgtaacttcactgacaagtattgtcctggtggtgtaattgagactacggacgatgatggtcgttctagagttgtaacaagaagtccaattaaatgtccaccaaacacagagattccaccgggagtagataatgctagttcaatcaacttttgtaaatgtactaagggctactattttgtatcaaaagatctgaagaataacgagaagatatgcaatgcttgtgctcctggaacttacaaaagttcagtcagggattcgaattgcaatggtctatgtactcagaatgcaactagtttgcctggtgctgaaagtcccaatcactgtttctgtagatctggttacttttatctggagggtggtatttgtagcaagtgtatggaaggagctaagtgtgatggtgggttggttaactacaagatgaagactcttaagaatttcgttgtcgacattgatgaccatgttaaaccagttgctgttgaaggttactttttggataagataaatttaaagttgaggaagcccgatgattggaagtttatcaaatgtcccatcaatgggtcatgtcttggaaatgacaaatgttcagctacaatggagcattatttgtgtagtgagtgtaagaagggatatactaacaactttgtgaagggagctttgtgtcagaaatgtccccaaattctccctaacattctcacagccatattgtattgctttggatttttggttataaacattgttatggcacgactcaacataagttcaggatacaaccgtcgttcaatacattctgtcgttattaagattgcactaaacttttatgcctgcacaagtgttctgaatgttataaacgtcaatgacttaaaactacctgtgggtttgaagaagatgataaacaagtggattaaggtgtttgattccgatgatgcagtgtattacacatcaattgattgtgtgattagaagtttatttaacctggaacattctgattcatttttttacacgatgctctatatggcttgctcccccttgatattattgtttgttgtgactctgatgatgtggatcattatgactctgtttaaggttattaggtataatgatattaggaagaagttggctttattacaacagtttagggctaggtatgagggagataatcaaaatagtctcattgagcaatataggaacgagaggttacttatgatattaagatatattccattacccaacgagactgcatgggatagatttaagaactttttggaagatatgattcccatttatgtcacagttttgttttctatccatggcaaaattacgagtaagatgctgagtttgttggactgtacctatatagatttgggtcgctccttcccaggcaaatatgtgttgagacctgcaatgagtataaggtgttctattaatccttcagcaggttatcttagatatttgattttgggtttatctggattgttagtttggggtcttggtattccattcctgtcattcatggcattgtttgttaacagaaataacttgtatgctcccagcataaggatgaagtatggatttttacacaatggtttcagacaagattattggtattgggaaacgatagtatttgctagaaagtgtcttgttctacttataggtagtattgtcattgttccatcagaaaactacagtggatctagaatatggatggcaacggttgtagccttattattttcgtttcttcagttaacatgcgaaccatttgacgaaaggtaactcaatatcaatccatttattaatgttattttagggactactttgtactaggaaggttagaaaaccatagcatgagtacatggacattaacactcttacttgtagcattcctaatagaaggaaactttacaccttcttacaatatgtaccttctttctttcatcgttttgattaaccttttatttttatttgaagttatttttcaattatttgttgcttattgtcataattttagaattcaaaccaaaccacctaaattttttattacaaggtttttttatcatttattctccaaaatttcaaataaaattaaaaatgctgaaccaataatattttttgaccctataacttgctcaacaaacttgaggtcatctaaaaagattgtcaacaagtcaatttttgatagtatcgatgtaattacttacagtgaaaaggattatttttcatatgtaatgaatgagattatttgctttgcaaatatcaggatgaaaatagatgtaattccttgtgattttcctgagtatattactagattaacatttgccgtttattttaacgaatcgtctaaacaaaaaatgagtaacctggtaaagtcatttgcagatggtaacattgacaaattggtaaatatatctatgatagagaacaattacaaccaaaacaaaaatgataacaagagttatattgacgataacctggtggttaacccatctctaatgtttgacaatgagcttctttctaaagggatgccactttctgatttttatgtagctttgtcaattataaaattaaaggacttaagatcaatagctaacacgtatttacattatagagattataaaaataatgaaaagatatttaatttggggcgcgaaactaaaaaattggatgatttatctgaaattaccaaaaaattaaacgaattagatccatccgaaaatatagaggagttattctgttctgaggctgagttagaagagctttataagaaaattgcagatgttgaggataaaattcgtatgtttaagagggatccacttcaggctttgaaaatttactatcctgatgaatattcccacataggatcgggagattttgaaagtgatttaattgcctttggattcaggaagaggtttcaagatccaagaatttgaatgtaaacaattattttattattattgataatcattggatttataatgtgcaattgtgtcttgcctattaattggtttgaacccaaaattttcaataaattgtttacaaaatgactctctttcgtcatcatatttagttttcctcgctttaacgctcttgcgttcagttttataacgattatttgattccttcagtttacgtagtctttcccttatagcttctttttctttttttaagtcttcgatttcagaatttattttatctatttctttagtaacattatctatactttcagtactattcattgcattttcaatttctgttttctgtttcataagattgataatttgtaaatctagatccttactaatctgaccttcgaaataagttttatactgtttaaataactcatacaagacacataatgtagttttgtccatgttatataagttctctattgattggaataaatcagagaaatatagatcgttttttagatgagattcgtcatacaacgagttaattattccgtttatttcatcacttttaattccacggtgatttaatatatgttctaattctgctacatatgaattggagccgtgctcttttttgtatttatcaatatttacatacttgttcttatttttataaccttcgcttgtcacgccctctatgatatctgatatttcattttcatcagattgggttgataaattcttttctataactttattctctgcatttgcaattgatattgagtatctgattagaaagtctatgaataatgaaggaataacatctaggtttaagtgacaagctgctagtttgtagatttgtgatatagttgcgtcaaaaaaattggagtaaacagaaggtaaattttggaaatgtattaatcccaatgttttgttttgtggcttaagaaaaatactagaatcttctttatcataaaaaacgactggttgtttgtaaaatagcgggtagggaattttaacttttcttgacaaatatctgggaaagaaaaatgaaaataaataaaaaagctggggaatggaaaaaatgaaaagataaaataaaaattcgatgataatcaaagcattgaaaaacaaaatcgtataaaaaataaaaatagagaaaaaatctgtgatattcccttctattaggaatgctacaagtaagagtgttaatgtccatgtactcatgctatggttttctaaccttcctagtacaaagtagtccctaaaataacattaataaatggattgatattgagttacctttcgtcaaatggttcgcatgttaactgaagaaacgaaaataataaggctacaaccgttgccatccatattctagatccactgtagttttctgatggaacaatgacaatactacctataagtagaacaagacactttctagcaaatactatcgtttcccaataccaataatcttgtctgaaaccattgtgtaaaaatccatacttcatccttatgctgggagcatacaagttatttctgttaacaaacaatgccatgaatgacaggaatggaataccaagaccccaaactaacaatccagataaacccaaaatcaaatatctaagataacctgctgaaggattaatagaacaccttatactcattgcaggtctcaacacatatttgcctgggaaggagcgacccaaatctatataggtacagtccaacaaactcagcatcttactcgtaattttgccatggatagaaaacaaaactgtgacataaatgggaatcatatcttccaaaaagttcttaaatctatcccatgcagtctcgttgggtaatggaatatatcttaatatcataagtaacctctcgttcctatattgctcaatgagactattttgattatctccctcatacctagccctaaactgttgtaataaagccaacttcttcctaatatcattatacctaataaccttaaacagagtcataatgatccacatcatcagagtcacaacaaacaataatatcaagggggagcaagccatatagagcatcgtgtaaaaaaatgaatcagaatgttccaggttaaataaacttctaatcacacaatcaattgatgtgtaatacactgcatcatcggaatcaaacaccttaatccacttgtttatcatcttcttcaaacccacaggtagttttaagtcattgacgtttataacattcagaacacttgtgcaggcataaaagtttagtgcaatcttaataacgacagaatgtattgaacgacggttgtatcctgaacttatgttgagtcgtgccataacaatgtttataaccaaaaatccaaagcaatacaatatggctgtgagaatgttagggagaatttggggacatttctgacacaaagctcccttcacaaagttgttagtatatcccttcttacactcactacacaaataatgctccattgtagctgaacatttgtcatttccaagacatgacccattgatgggacatttgataaacttccaatcatcgggcttcctcaactttaaatttatcttatccaaaaagtaaccttcaacagcaactggtttaacatggtcatcaatgtcgacaacgaaattcttaagagtcttcatcttgtagttaaccaacccaccatcacacttagctccttccatacacttgctacaaataccaccctccagataaaagtaaccagatctacagaaacagtgattgggactttcagcaccaggcaaactagttgcattctgagtacatagaccattgcaattcgaatccctgactgaacttttgtaagttccaggagcacaagcattgcatatcttctcgttattcttcagatcttttgatacaaaatagtagcccttagtacatttacaaaagttgattgaactagcattatctactcccggtggaatctctgtgtttggtggacatttaattggacttcttgttacaactctagaacgaccatcatcgtccgtagtctcaattacaccaccaggacaatacttgtcagtgaagttacaagaaacacagcctttgtcaaagtaataaccagggtcacaaacacactgctccttagatgtggcacccttcttaccagtagtagatgaattctcatcacacctagagcatttatcgttagaaatataagatttataatgattctcaggacactccttacacacattctgagaatcaacatccatataatatccttccttgcaagcacactctgatgatgaagatgcaccttgagccttagtttgagcattggaatctgaacactccatcggctgtctatcattcatagcatcatccttaccacccaaacaatacttaccagcaggacaaatagtacaatgtttagtaacaaaatcaaaatatgtgcccttgtcacaaacacatgaatccttcgaagtagaaccattggacaatgttatagatccgtgaggacatggaacagctggaacgttaccaacaacatctttgtagtggttttttggagcaggaatacacttcacagatgaaccagatgtcacaggaatataaccctcaacacaaagacaattcaacatactcacattcttattgtaaggctttatagttattgaatgtttaggacatggtagatttcttccagacactatttttttatctttatcttcatacaatgatcctacacaataactatcttttttacacattctgcaaggttcattatctattttggtttcataaaatccctcatcacatatattgcaatctgttattttgttgcttcctatatctgatgtgttcgaatactgtggacatttttcacatttttcatttgattgtgtatctttgtaagtgttctttttgcatggaacacatttaaactttaacgtgttctcggattctatctctggttcctcaatcatcgattcattattttcatcatcccatacgggttcatagccttcactacatttacaatcattgatgctggtagaacgaggattagaactagtgttgtctgggcatttgactgcttttatatgaaatcctccggagcagtaatatccctttttacattctaaacattcatctgtgttttcgtcttgtcctccccaataaaatccaggcaaactatacaattgttaattaagataatttaaagttaccattcacactttcttccttcttcagaagtactcccttcaacttcagaaattgagtttttgtagcaagatccaatgcaaggatgaaatccaacagtggatttataagttcctaatattaatgattatatagtccatctatacctggtgggcatggcgtacacacttcgtttcgtgtaattggatccacaaataaagaatatcctttatcgcatgtacaatcttccaaggatattgaaccagtgttatttgtaatactatattttgggcactgggtacactctacccacgtatcactagatagttctaattcaatggagttgtacgttccttttggacattttgagcaattaccattatcataatattcaccatctctgcagctgaattttatgtttatttctgattttttctcaactccaagaattttggaaaatatattgaatcttattaccttcttctgaagattatggacatttatatttagttccccagtaagattatttagtttgattatactatcaatataaccttttgattcagtattctctcgaatgtagaagtaaattcttttgtttaaaatttcattatggttgaattgaggcatcactgttaacgtttcattaatagtcagatgagatttgatgtcataattcaggtctggcaaatcgattaattcattcaaaggcgtccatgtaattgcccatttaatatttgatttgtccctcatcttgctcaatatctcctttacgtcactcccgattgttatcggatcatttatgtagctttcccttgttagaaataatttatatttacctggtccattatgtgctacattgatggatttcaacatccaataaccgggaatcttgttgatactacataaaaagtatatcttattgtctttagactctgctgataagatagctccgtatctatagttttcctaaaaatgatttactgataaataaggacttacccttataataaacagaagtatagaagattgattagtgtctgaataatttaatgactctattgatacgatggatcctagtagtgggtcaagatcatgtacttgagtaccagttgtatatcttgaaatatacttcagctcatcgttgtctatgttgacagtgacccacactatttcatcagttatgttctcaattacaaaacagttaaatacattagattggtctactgagattatacacgacaaagatattgggtttactattttagcgtctttatttcccttacataatgatttgactgttaccaaagattcatcaagtaataatatacaagagacataagaatcaatcacaactattctcagtttatctccattctgcaaaagttcaaaatctgctgggttatggagtatgtgaatgttatatttagtaacctcgtcaagtgtatacttattttttatttcagtgcaatcgtatttcacaattaaccttttatctatcattaatacataccaataaattttttcagatataacagccattctgatttttgttggtgattcaagtgttagtttgtaaactggaaacacttgtatctcctccttgttcgttatccacaaagtgacaagattcatttggtcaaaggtcctaaaatgaattatttcgaaatatttattgaataaatcgtcagcatcggtatcctttataattgatttctcttcatttgttgagcttttaaacttttcgatccatgctttgaatacacttctgtttttgatttcataattatacatggaatcgtgtctagtaccatccaaaccaagtaccttatcaaagttaccgtggtcaaagtcaacaaaatttttcttataaacatgaccaacagccgaatcattcgtttcattacggtatcttgcacatataagtttttcagtaaaatatttttcctcaccgacttcaagtcctgtatatagtaaaaacttggtttcgtctgttttattaggtgcattgtattcatatacattccctttatatgaaccagaaacggtggagttgcactcagattttgaatctgaaatataaatcaactctacatcatttttattcattcccagtagttcaaccaatattggctgaacaacaagttggccttttgagttcgaatatgtcatcgaagttacattatttttagcacctaataaactttaagaccaaatgaaaataccttttactatgtaaacatattgatgtgttgttattaaagcgttatcaacattgataaagcacacattgtattttccggcctgatatggttcaaatactgccttatcttccaatctattgtttttcttatgtaacatatgtttcgagagattaggcatttttttgacggttgatttttcccaatcgattttatatttttcagaaatatttgtgcaatcaccattaatcagacttgactcaatcatgaatgccttctgattgtctagttggacctcaacctcttttaaaatatcgatttcgttattctcaaaagaaatttcatctaataataaatgttttattaatcttgttaccgtttatgattaattctcctatttcaaggccataatcttgcaatttgaggcatgaatattttttatctttttcagtataatttaagcatgcgcatactttcattttaccgatatctttaaatgggccaaaagggcccaaattaaagaacctccttggtgggaagtcaatttcattatatattttaaccttaaagaatttatatctttcttcttcatttttagcattcccttctccctgtccgcacctattgttctccttctccaggtatactgagaatatacttgataatgagaaggcttcaaattccaaataaaattctttgctttttggtttataatatctttttttaactaaaaatggatttaatttatgtcacaaaccgaatttacaattggaataaggttcttcagggtagcatttttttaaacttccagggcattttcctctagaaaaatccagtccgtgtatttcctttattgttttgaaatattcacaatagtcagtttcatctttgtgtttatattcctcaacatcttctaaacatatcaaaatttaggccatcaattacctgtattctcctgtttattagtgttataataatataaatcggagaacatatcattaacggggttcttcccaaaagttttcagaatttcttcgatctttctatcggaaacccttgcagtttttttaataaatgtatctattgaaaattatttttacataaagtaccataaagatctgattgtgaaataattatttctttatcttcagccaagggtttatcatcataagtcgaatttttatgggcaggacagaacttggtgacgtcgaaattaggtctcctttcaagtgtaaattttctatctttgtaagttgaaccaatacattcgactaaatcgtatccataaatacaagagtttgccaatgaatttgaagaaaatgtttttttgatgcatttacaattttttgtagtttcattacacctagctactgatcctgggtacttgcttttacaatccaaatcagccaagtactgctttaatgaccttggatacatatgagctatataatcattaaaaaatattaatctaacttctatatttgaattttattggttctggttctataaatttctttaggacatcttcggtgaaatgttcacgcttttttttccattctacaaatacacatttaatatatatatatttaaacatatatagaacattattctcctttgtttataatttaccttccggaactttcttaataatgtcctaaatataaaattgtaattgtatatagatgatataaatattaatatacatttggcacataactaagaaaaaataataccgtttcggttgaagaaagtaggccgaatttaataataaaacaaaaaaagacgaaaatgtgtaactttgatatcattttgaatgattagtgtacaacataattataaaacttttgttaacaacttttaaaaacataaaaaacgtgttttacagatttaaaataagaattcaatgtaattaatatattgtgttttgtataatagggaggcgttcaaataggcacaaactagctagctatctgattaaaagagaaaaaataaggggaggaaagatacaaatctaactaattaggtaaaataagttaaaacaaagcgaaagaattgtttaaataagttaaattatgattttttaaaaaaaatttcatgttgaaatcattagttgatgaaaacttgaactaaaacattacacatttgcctaaaattagctgacaaaactctcatagttaaattatttttaatacgtttctgtattagaatatgtattgtgagatgactggtattgatgtatttgtgttgtgccttatcaaacttaataaataataataagttgtattaacattatttttgaacttttattattgtaatatattttttaattgttaattttgttagagtacagattttgttataatttatgaatgcgaatcttattcattacacaattaattatgaaactacaaaatacggatcctttttcttctaatgttatataaatatcttcttatttacattgtaacaacaatttccttatcaatttcattgtattataatacttctacgacaagcaacacaaatggttcaaattttaacttgttcgacacgaacaatggaagattcctttataaaaatcatgggtgtgggaatattatgaataaaaatacaaataaacacactgttactgcttttataaatgagaattctctaaatatttttaaaaatgaactcaaatatcgagatttgtcaaagtttgcaaaagcccccgagtttttagaagaagaaccagtagtcccagaactgattagaaacttttgtatcattgctcacgtagaccatgggaagtcaacattggctgataggtttttggagtttaccaaatcaggtattcggatcaatactaatataagttttcagtaccacctgaccgattaaaggcacagtacctggataatatggatttagaaagagaacgaggaattactattaagttgcaaactgctagaatcaagtacaagtcgattttggacgaccaaacgtacacactaaacttgatcgacactccagggtaatttaaggattattaacatgttttagccatattgactttaatcacgaggctcaaaggtcaatttcagcctgtgaaggagcagtactagtggttgatggtacaaagggtatagaggcccagactgttaccacagcaaacatagcaattgagaagggcctaaaaatagtaccagtagtaaataaaatcgatatacaggtattctaccatttataacagtttgaatagcactgcgatttcaaatctacagctgaacaactgaaaaagctgtttggattcaaagactcagagattctaaaagcttcggccaaagagggtaacctcaatactaattataccttttaggtattgggatccaggatatacttgagacaatcgttgtaacaatccctcctccaaaagtggacttagaaaaaccgtttagagcacttgtttttgacagcttttatgactcctacaaaggagcaatttgttacatcagagtacgttgtgtaagtgagactgagatttttaggtttttgaagggtctgccaaggttggggatgaaattacgctgatgaatgcaaatataacctcaaaagtgactggactaggagtcttgttgcctgaaatgaaacaaacgaattctttgcagttagttaattgaccgatttataaaattactaggtccggacaagtaggttggttaacggctgggatcaagaggaccaatgaagtccgtgtcggagacacaatttcactaaaatcatttgtgaagtatgataattaactattcatttatgaagtatggtaattaagtattcatttgtgacttttgagcaatttattctcaggaaaaatcttgttgagcccataaataaattcgaaaactccaagcccacggtctttgcaggaatattcccatgcataggaggagattttaccaagctcgaatctgctctggaaaaacttaagttgaatgatcattcctttcactttgagaggtccgaatcaagtatggttggagttggtttcaagtgtggatttaatgggttacttcacctagatgtgacagtggagaggcttgaaagagaatttgacaccaaagttatagtaacatcaccttctgtaccatacaggtgtactctgagggataaaactgtaataactgttgatgacgcgtctaaatggccggacgatgttatcattaagagtagtgaggagccgtggacagatgtgactctgagggtcccagaagagtattttcatattcattaaaaacatgtttagttgctctggagctgtgattagtatgatgggcagaatgggggggaagttaaacgatgagtacaaaattaaggacacgaacatgaaaatattggaatacgaggttccgctctccgaaatactctcagacttcttcaataaactaaaggcagtcacaaacggttacggatcctacgattatgaaggggtcttttatcgacccatagaactgtgcaagatgaaaattctcttaaacggcactgaagcgaagggtctagcagtggtcataccaaagaacaaagcatacgaaagaggtaactagtacaggaattaattgtttccaggcaagtttattgttgaaacgcttgttaaactggtgcccagtagacagttcaaggtgccagtccaagcagctattggcaagagggtaattgcttcatcatatattcctgctattaagaagaacgtgattgaaaaatgtagtggaggtgacccttctagaaaaaagaaacttcttgcaaatcaagctcgggtatgttaaggggtgataaatggtatgtgtaggggaagaaggaaatggctgaggtgggatgtgtaacaatctcttctgatgtgtataatgaaattgtaaaagcactgagggtctgaagattatgtaaaatggttttataagtaactgaaatccacacagaagggagtttaaagtgtaaatttggcctttagatacagtaaattaaatatttgataacgattaaatgttagaaataaggaaaacatcaatttaagtcaatgatcaagtttttatagttcagaatttataaaaggagtaatataatctgattttatttaattttactcttttatattgtgaatatttgattgtatgatgggggtttgactacaccaatcatgtaaatatttttatttggagtacttaaaatctttttaaaccccaaatcgcattaattatataacaatattttgtacataatctcgtttagttaaattaactgtagtttttgtttaatcacactagaatcttagtggaggcctaatccctctagtatattaaatttaggccagtatttcgtaaaacataatgtacatataataataaaataaattctgtaacttaattgttgaaaaactaagaaatgtcttggattcgatcatttggagctggttcctcactctttaacaataccttcaagggtatctcgtttaatgatcagagggagcccaattctgaaaatatctttaaagattattttcaaaactttaaagaatataaaattaagaatcctgttaaaaccaaaactctggactctaaatccataaatggcttcatttccgagagattccaatcactactgagtgtagcacactgctctgaagagaaacaagaatctaaggaggaccaacagcatccgcagccatcaccgtaagcccataattaactaacttgtttcagtttcgacctactcgtttacgagaacttggctcgagagtacaaaaatgttatcacccaggataactatgatgggtttagactagaagccgataggcagatcactaaaaatctccaagctagtcattccctttacttaggaacactcctaaaggacgttggttatatataccagattggagccaactacgcaagcgatgatgggaagaagttcctcatgttcaaggtgggattggacggaaatatcgccctcaagtaagccctgattgtgttttaatttattttagagcctttgccaagttgggaaatagactagagcttaaggcagtcacaaattcacgactcaaaattgataatcaaagcacctttgaagtgggagctgattacctatcagactactggactgccacattaaagtgttgttggcaaggtattttctacccagttacaatatttcacgaattctcagtatctcggattataataatgatttaggaacctttatatggaatatctgttatacacaccagatcctaccctgttttacagttgggtctgaagtaacatatattgtaagttaaccaccaattaattttattcaggacgctaatggagcttctatcggttctttgtctgcaagatatgttcggggtgataacatttttacctgttagtttatttaagtaattattgagattaggccaacttaccagacagcctgacttcaagcacatggacttttcgaaaaaggaaatcaactgtgccagagtgcaatacaccagaaaggtcaacgaccgcttatcattggctacagaacttgagttatccccttcaatcaaagagtctgcacttagagtggtacgtttttataaaaatttcatcaatttttagggctgggaatacctgtttaggcatgccagagtccagggtaacattgacagttgtggtcggattgccatgcaaacacaagattacaatgggtttggcgttagtggatgcattgattactggaataacatttaccgttttggcttcatgatgcatcttctacctcaacctgaacagaaccaagagaatccacagccagcataatgttgttacaactgtatattgcacattatacattacatattatatagtatattatatatagtatagtagaaaatagtaaaatattaattttaaattaataatttgcgattggcaagtggttagcaaattcctttggggtggttgttttatatgtagttttgggaacttccaatgcttgaagtagtttaccacgcttaaaaagctccaaaagctcgtcatgtccagcaaatggaactccatccttgaacaaaatattcctcacaggttcaccactaaacgaaattagactcagctatgttttaaatggtgtataactagtaaaatgaataaaaattacaatttggagcacagaaatccaaagaccggcggatttgatagaacatccagagtatgaaagttcaatacttgtaatagagtgaacatcttaacaatattgccagcgcaaagagactttggagcatccacagagccttccatgaacagtaaaagtttatgggtggctaagagatgtgtcatttcagaatccactgagtccttgctggatttataagagttaactgagaattctgcatagtccttgaataatttactttcaaatggttgactacaaaaatcttgttgattttgtgttttggaagatgaagataatctacggaaatttgtgtatacgcttgatgtattcttcaaattattaaatctataaccgatacggttcaaagacttcaaagaattatttaaaaacattttaatgaagttgatattaaaattaataaatatgattaaaattttataggaatcatgtgcataacggatatgtaatttattaaaaatttgaggggtggaagtaaaaaataaataaattcttgttttaaaaaattaaaataatttaataaaaataaaaataaataaaatgagcgatagcgtttgagaaattggatatcattcacttccgagactgatggggatcggaactaaggaatcacatctaaaccatagcttaacattataaatctttataatgtaccattttattaatgtttcaaattaattttaactgtatattacataaaaaattttaaaaactttaatttcatatataatatagtgaaatatacttcgagtaacatatgaaccacaaatcagaagtttcacctaaagatcataagcatgatgatcatcttaataaagaatctgccgattcaccgagatgtcattcagacggactcgaatatgataataaattgatgctaattgaaaaaaaggagaacataaagatgatcggattgaaagatgaggaaaaagaagaccgtttttcagattctaaagaatcagaggataactttttagaatgtgaaagtgatgttgaatttgcaaatgattctgaaaaccattttttcaacaatattcagggttcaaatgtatgcaaggagtccgaggttcttgataagaaaagtttatatttaaatgcagtaaaaaattttaatgtaaaaaatttaataaaatcacatagttatcactgttttccgtcaaattttaacggatttgagggccctaacggccacccattaaattcccaaacctttgtacatggagcccaatacggctccatttctaaccagtattaccatttaaatccagaattactttcacttcataatcaagggggcggttattccccagccttccagggtcaattcatcgaccctgagcttgttcaggacagaacaatgatttcaaaatccttcctatccagggaaagtagaaaaggctcccgtgataggactaatgacattcccaacctccaaaacgataattctgcaagcgactctatatacgaagacttttcggacataccatcagaggtaaactctgaactggagtctagaataattgaatttcacgaagccaaaaaaagtttaaccacctcagaaaacggtgatattgctgaaggtgccaacagacaggattctagcagtttagtatacgaacctgaagatgaaattgatgaattgtttgacagagttatcaattgtgaatacgacccggacttcaccttcatcccagtggcattggacccttacgttaagatttccaacaagttaattgcaaaaaggtctaaacgttatccgcgtcacatggccaacgctaagtcatctaaaaaatcttcaggaggctcatcttcttcatcctcttcctcatgctccggtgagtgtggacataaatcttcaaaccagaaaggtgttaattcaaaagtaaagattaaaactaatgaagacaagtcatcactctcatattatgttcccggggattcatcggcagctaaaaacggtttagtctcggatgaatcacatgagaaacacaccaacaactcagctgataataagataggagaccgtataaacgtaaaggatattgacgagtataaacaagttgtgagattagatacaaaaatagagccttcagtaaacttccatgatgttcaagaatacgacagcacagattctgaggttgaaaagcaaaaagaacgcgcgagagtactgtttgaagcgactaagaaggaggatcaagaaccctattcagaatcagatgatgaggacctatctccaaatatcaagaacctcaaactcagcaagaaatcgagtgaagataaatcaaaatctgataagaagtcaaaaaagtccaagcataaatctgaccaggaatcagaggatgaaaaggtctctaaaagtgataaaaaatcggacaaaaaatcttcaaaatcatctaaacacaacaatgaagctgataatgataaagatattgggaaacttgacaaatcagatcctgaaaaaggaggtaaaactgacaaaacagaagttgaaaaggctgaaaagggagataagagtgaaaaacacaaagataaaaagtcagaaaagattaaaaaagtatcctggaagtcaacagactatgacatgatattcaataacttgggagagtgtttctcatctggacacattggccacgacaccaatccaatagttctgaatagaaagggcttttacactctgtttttcagaaactctaagtacccatatgactccaacattgacttctacctctttagaattggattcaaatactccctagtaaatgaacccaaaggccaagctgcaattataggtatttaatactcagataacgatattcatattcttactcatatttatatgcatatattatacaatggtttaaatgataatttagacgatgttgttgattatggaaattttaagattaagttatctggtaacatcagtcttagccccaatgttacgaaaatgattctcatttactcaaattctgaaagacaactccttgaattcactttaacaccatcagcatttggtattatactatccataaaactaaacaattattttatatatttaactaataatatgtatataactaataatatatatatttaactaataatttttagattctaaacctaaattggcatacaagttgttttacagtggacctcttctatcaataccaactccacttagattcaaaagaaggtatcacctactaatccactaatcattatttattaaacaatttaaccatacctactcacccattcaaccttatatacttttaatttaataaataacgatataataaattcattagtctccgtgttttatcattggataacagtgagaacctgggaacttcagtaattggatcactatacttgcttgaaaagaagcttagcgagctcaagaagaagaaaattaacctagcagactactttgactatatctgtggaacaggttctggagctctgatagctctttgtctcctgaagggttactcaatgaaagatctcagagtcaagtggaaccagatagtctccagcctattcaagtgggcacattcccttccctctggcataattttcgattattactatattgaggagttcaagaagagctttattaacatccttggaaccgacttcatgtgctccaagtcatacccacattgcatggtcacgtccaccaacgttagatcaaacccctacggaatgttcttattccgaaactatggaaactccaaatgtacgttttacaaatacatacattatttttatcccattattactctattacgcttaacaatattacaatattccactattaaaccatttatcaagcctaatgaaatgtttagttggttcacttgacggaacttcttatgctcctttatggcttgtgggctggtcatcttgtgcattacccacctacgtcaggtattacgcctacatttatgttattaaacttttctaattatttaattattcaactaagtaattaagcattcaagcccttaactaaatttcatagggggccaagtaactctcacctgactaatattggctataatatgataaacaaggtccacatggtcgacggatcagttgtatcctcaagtccaagccttgtctcactccaggaactaacaaatatctataatattaacttaaggacccttgttaaggtataacattcgccataaatacctatttaaccctaactcacatgactaatgatggtttaggataatatggatttgtttttgagtattggaactagcaagtctgagaacgactccggatctataaactcctctacttggcaaatactgttaaacagcaagaacctcatgtataacactcagctgcagcacatgcatcttaccagcctctttgaggagtatgaaaacaagtaccacaggattcagctccccatttaccctggctgcaaacacggaaaaacttccaaggaggatgtggacgctgttttgacgtccaccatccagtacatttcaagacatgacaacaaccgcattgagcaaattgttaagattttaaatcagtaagcattttaatttaataatttttataacattcatgatatgatagtttaatttataaaaaattaacttcaaattataaaaagtaattgctatatacaatcggatcaagagtaaattataaatcaatcagtctgacttacaaatcgaccttaaaacgtactgtaatattccgccgtgtttgtagtattcactctaaaattaaaataaattaattaagggaatacctcgatttgtgtatcaactctgcatttagtgtcaaatgataatccagtgtcagtggtgaccctgactagagaaccaggcacaacatcacttccaaggtgaacagtaaatttctcagtccctataaaaattttaattttaattttaacattattaaagtgtaaagtataaaacataaggtgaaattacccgtaaggttaagcgttgtggcgttttggccatctaggaattgtaatggcaaaatcccacatccaacaaggttggttctgtggatcctctcaaaagattcggctaaaatggctttaactccgagcagaagaggccccctaaacaatcaaataaacacgattatataaaaaataattgaataactggaaagtatttttaaaaataatttatcaggtacttagctgcccagtctctcgaggatccggtgccgtactcctttcctgcaacaactaccagaggagtgttgtccctctggtataattcagaagcatcatagacagacataagcttgttggtgggaaagtgcactgtgttggggccttgcccggggcagagaaggttattaatcctaatgttggcaaacgtgcccctggacatgaccttgtcatttcccctcctggacccgtacgagttaaaatccttctgttcgacaccgttttccataagaaatctcgcagccggtgagttcttagcaatgttcccagctggacttatgtgatcagtggttatggaatcacctgaaaataattgaccacgtgaaacaatgaaataacgaaattagaaggaggaataaataagggaatgagtgatgaataaattgataaagtggtacctaggaggagtaaaactcttgcatcggtaatgggtttaacttcatttagtttatccaaatgcatgcctttgaagtatgggggatgctgaatgtaagttgagagttcatcccaggggtacagctctgtcttaggggcgttaagtttacgccaagagtcacttccctcagtaatgttgtggtaaacatcgttgaataagctggccttaacgaactgagcctcaagactagacacctcttccttacttgggagtaagtcatgaaggaaaacgggcttcccggttttcgtgctaacacccaggggctcattcatgaggtcaaagttgacgtttccggcaagtgcaaatgcaactacaagtggtggtgaagccagaaagttagctcttgtgtgtgggtgaactcttccttcgaagtttctgtttcctgacagaactgatgaaaccaccagcttgttattcactacagcctcagtaacctcagggtcgagttctccagagtttccgatgcatgtcatgcatccgtaacctgcaatgtagaagcctagtttctccaggtatcctattagtccactcaactccaaataacgtgttacctgttaaatttaatttaattcaatatttaaaaatataatgtgataaatttaattgaatatattaaatatatattttgtaatttcgaaaaatatataattgtgtaagtggtacagttttggatcctggtgataatgaagtcttaatgtaaggtttgactgaaagcccgtgttccactgcattctttgccaaaagacccgctgctaacatcacagacgggttgctggtgttggtacatgacgtaatacttgcaattaccactgacccattatccaattcatactccttgcctaaatacaaatttagttaagtctattaattaatttgaacacacctttgtatgtaaatttaactttgttcgacaacttatctaaaccgtaaccctttgtatctttacttgttagtaactctgagtacttgcttttaacgaggtgtagtggtatgttatcttgaggtctctttggtccggctatacttggggtaagagtgctcaggtcaagtcttacaactgtgctatacttgatctcaccagcgttactgcttgaagtgtggagtaggttctccttagagtacctctccaggaggtcgactttttcatttggacgacctgtttgaagaaggtaatcgagtgttagctggtcaatagggaaaaacccaacagttgctccgtactctggtgccatgtttgcaatagttgctctatctgctaaagatagatacttaactccttctccaaagaactccacaaatttccctaccacgcctgctccgctgcgtaaaagacttgtaactgccaaaaccacatcagttgaaaacacattctcacttggctttccgacaagctcaaatccaaccacttgtggtagcaacatgcttatcggttgtcctaacattgttgcttctgcttctattcctccaacgccccagcctacaactcctagcccgtttatcatggtggtatgggagtctgttccaaccacagagtctgggtacaacaagtcgttcttatcaaacaaacacctggccaaaaactctaagttaacctaaaacccattataacattgacaaaatctgtgatagcaatattctatgtatggtagtaatatctagtaaaaatgtgtgattgatgcctgatgaacaattcctgatcctggaggaacaatgagtgtatttttaaaggtttgtgctccccatttaagaaatctgaacctttctgaattcctgttcatttcagtttcctggttcagagccaaggctttggagtcacggctaaagtcgacttgaactgagtggtcaatgacaaggtcaactgggaccagagggttaattctggttggatccttgccagatttcgctacgaaatctcgcattgctgccaaatcaacgattgttggaacacctctaagtcatattattaagtttacacaaacatacgtgaaatcttgaagtaagactcttgatgggatgaaagggatttcagtctgattcaggctgtttttggcccaacctaagatcttctcaacatcattactggttgtgctacacatttatatataaaatccatttatgaatattttatattaaataccataatttataaatactatgtattgtaaatttctattatcttacctgaattcatcacaatttcttactgctgcttccaacagtactctgattgagaatggaagctcaaaaagccttgggtctttcagatccctcagggaaaaatacttcttattggttcctgccagggttttcttgaccttttcaaacgggttaggtctagaagaactaaagtttttcatttgtctcagaactgaaggactgctctttaaccctaacttttctccaaatgatacgaacatattaaattaaatagttctttaaattagttacaataatattaattttaaaaaatgaaaaaatcaaggataatttaagattaaatatgaacctcaattaagatgattattgattttcatatttttggattccttgcgaatctctaattttaaatatcattgaaacaaaagttaaacctgaggttggcaaaaattatatttactgaggtttatttgatttaaacaagttaattgtcacagatgtgttcttttattgttcgagtgatacatgtcagtatggtgttgagctttttaaatttattttaggcctcatacaaccattaaacctctagtaaacattaattaatttatctataaagtatgctaatcatttgttcaatattaaggttaataatggctacatactgtataggtatatgattgtgtaattcaaggggataaagaaattaagattctttagcaaacttcttctttttactaccacgtaagagacctgttcttctggcggcgatgagaccaaccttctgtcctggcggagcaagtctggatattgttgaggggtgtccaatgtgctgatgattaccaccaccatgaggatgttcaactgggttcattgccacacctctgaccttaggccagcaatttctcttggctttatacttgtgatacgctacaccagctttaaggaggggcttgtcaattcttccaccgccggcaacaactcccacaatacctctggctgctgaactaactgtcttcctggttccagaagggagcctgattcttgtagtttttccatcatcagaatgactaattactgttgcataacttcccgatgtctttgctactcttcctctgtcacctttcttttcctcaaggcagctaaccactgtaccttcgggcattttcccaagtggtaagcagttacctactgccagggatgcgtttgctccgaagtagacaaattggcctgagtaaagtccctcaacagccacgaacaactctctatcaagtccatacttgtatgcatttctgaagacgactttagccaagggggctccccttccggggtcatgaactatatcctttacaacaccccttatataaccgtgtgtctctgcgtagtcgaggcgtctgagcttgactgggcccttcctcttgtgggtatgggctctaaacacggaacctctacccttcctctgacctaaattaaaaattattaaatgcaaataaaattgaacattaatgaacagagataagggttaaagtggaataattacggtaaatttgggtgtgattatgtgggaaggggtataattaatgaaattaaaggataaaaacttacttctaataactcttcccatctggaatgtatattaaactgatttatattgaaaataaaataaaattaaaccgatttggataaaaatttgaaaatctagggcccaaatagaatcagccgaagattgatcctttatcaataaaaattacgaaataatatatatgaaccccaaaaaatatttaaaatagccttatatacctaacaatacttgcggggtagactatatttaatgttataactggtcatttaacacataggaatggggaagattccccacctataatggcttaacttgactcgaaattgtcgaccttaattattattctactcacttaatcttcttaatttctatacaatggacttaaattgtgattgttttaaaaatttctagcatataattttttaattttttctatcagtcggataatctaaataaaattttatttaaaacattgaactcatttaaaatttgacaaaatattttctatgaattgtatttatccatgtgttatagaattatctagaaatgaacatatttactactacattcatttatttaaatccacatcaggctgaatgtattctgtttgtaacgtgaaattggacttttcacatctccaagtgtgattttcctttaaaattttaaataactctccagaaattaaattacaggccacctcggcgacttctaacgcctacacatttcattaatattagattccaacttttcctatatgttcagatgagtaattcccctttgattccaaaaaagctacgttgtgtaaatgacagcagtaccctaagttcaccacagtgaggtcaggatccttagactgataataagataattcctaatcattccattaatatttactatatcagtatatatatctatatggtacgtttttgttgaaatctagtccagttattacatttccatcttgatctttaaaaatgcactgaacaataattgagttgatttatctaatataccactgaacaggctgaaattacatcgtacacttgtattccacagtcaataagggagaggcacattcccataatgagggctggaagcagacctccatcgtcatttgaaacgatgatataggcctcgatgatttgcgatgggtaattttgtaagagaatgtgtctttcgaatgtttcaatgatatgcgattttaatgtttccagatactttggagtgtgatacagataatttgaggttagttcaagagtaaattgaccatattcagttgaggccttcttagttgatatttttggtagattaactaaacattttgcgattgtgttccccaaactaatcatacaagagcctgagaatgcgctagaagttgacatcctaatctctgtacacattgatatttaattttaacaaaactgttaaatattagaattaactaaaatttttatggcctaaatattcatacctaagggccttagctcgttaaatgagccactcattaagatatcttctgaagattccatcatggaaaacttgttaaggacactcaaagggtaaaacagttaaatacataaaaatacattatacaattaaaatgtaaaaaatacaaatacttaaaatattaaatttataaacgatgtttgggtttaagaattaatgtccaaagagtggtagtaatgttggaagaagatgtgccgaaataatgaaaagggatataatattataattgaacaggaactaatattgattcttcctccctatccgagagtcaatgaataaatgactttaaaaggtgacaatttataataatcgagttaacaaattgaaaggcgttagagtttagaatacacaaaactaagtacaaaatattttacattattccattcatcctactaataattccagagtaattatgataatattcaaaagaatcaaaaggactcttaaatatgtacgaaccgaatggaaaagaagggacagtttgcttttaaaggtgttgctataattaggtttatcaagacctaaaggcctcagaactcttttttcgttcaggattcccatcgcattaagaagaaggaccgaggcctcgaccagatgtataaatgatagcaccatttataagatctaaggggttattatacaattctataggtttgcgataatattattattagtttcaagtgaatttgtggttaataaaacaatattaatacaaaataatgtgtaagatttcggtcatgaattatatataaaaataacagccattaaaaaaataaaaatctctgtaaatacaaatctattaaaaaaatttacacaaataaattcattataaaaaattgattaaattttcacaagtatattagatttatagtgtaacttataattgttatcctgatgttaatgcataattttacttttaattatgttcaaacaatcataaaatgtatagtaaaggttcagaacaactggttgtaaactattctgtacagaatccaccctatggcgcagtaattttatcaagtatatcgaaatacttacagaaatcagattcttctaaagtagtctttaatttagataacaaattgcaaaacaatgagttctctctaaacggagataaatttaatgaagttgaattgttgaaaaacctttgttctgtacttccacattgcgataaacttctagatgtcgtgaatcactcagaattggagtattggtttaaggttttgttatcagaaagagcgaaattaaccgaaaataaaggaacattagcagaaaatgatagttatttggaaaatatgaataaccacttggcgcaaagaacatatttaataggccatagattatcattatcagatattttacacttcagccttttaagaaggtttgtcaacttaatctaataatggtttcagaacatgtaatgtaaactctcttaagaataagtaccctcatcttgttagatggtataacttcatttcaaacgtaccaggtgtgtaaatacattcaataacattgttgatttaacattaaaattaaatttaggaacatctggatgtttaaagggctatgacactccatcaagcgcaacatataagaagccatttacaaaacaagaacaacaagataactcttacaaaggtgttcttaagggggctaaggagggttgtgtcgtcaccaggttccccccggaaccatcaggttatttgcatattgggcatgcaaaagcagcactgctgaacttttacttcgctcaaaagtacaaagggaaaatgctcgtaaggtttgacgatactaacccctctaaagaaaaggacgaatatgtggactcaattatggaggacctggagagcctaggaattaaatacgatgaacttagttacacttcagactattttgacacattccaggaatacgcagtcaagttaataaaaaaaggtatgattggtttccatacgaacaatttataggctattgctactgcgatgacacagacgttgaaacaatgaggaagcagagaggagaaggtgttgagtcaccagcaagaaacaactcagttgagaaaaatttggaactctttaatgaaatgcttaaggtattcaagaaataaatagataatattctaaatgatggttagggtagtgaagttggagtaaagaattgtttgagagcaaagatggacatgacctctaagaacaaatgtttgagggacccagtgttttatagatgtgtgacaaatgtgcctcaccatagaactggagataagtacaaagcctatccaacttatgagtttgcatgtcccatagttgactcactccagggagtttcccactccctcagaacaaacgagtattcagataggatccctctttataactgggtactagagaagtgtgagctcaggcatgtagagatctatgagttcagcagaatgaattttgtgagaacaacactttccaagagaaagttgagatggtttgtggaaaacaaactagtcacaggatgggatgaccccagaatgccaacagttaagggaatacttagaagagggttatcagttaaggcattgtttgaattcattttggatcaaggaccatcaaaatcggttaatttgatggagtgggataagttgtgggcgaagaataagcagattatagacccagagtcacctagatacacagctgttgtttcagaccacgttgttcttaaggtagtaaattacgaagaaccagctactaaaacaaggccacttcaccctaaaaatccagatttgcgggagatcgatcttgttttcggagaccaagtcatgattgaaagagatgatttcaacttaattgagaaatcagaagaagttacattaatgaaatggggaaatgcatttgtagataaagctaatctacaacttaaattaaaccttcaaggagatttcaagttaacaaagaagaaaatacattggttacctctgaaaacacccaccaatgttagtttttattccatttaatcaacaaatctttacagtttattaatttgtatcataggttgttgagtgtgacttggttgaatatgggcacttgctgaaagttgacaaagttgacgcagaacttttaacagaggatgataatatgagagagttccttgagccacaaactgaatgggtaacaaaggctctaggagaatcggctttatccaagcttaaaaaaggtatcaaacaatacaattaaaatttaaataaatatttacatattttattgtttatttataattaactgtaaattttaataaaatgtgttaggaacggtactacaacttgagaggaagggatactatatagttgacaagccacacgattctggaagattagtattagttcaaattccagtatgttttttaatcatcaataattgttgctaggacgggaaagttgcaaaacctaaacagaagaagtgattcagcacacctaacgactccaacttactaaactcccacttcattggccaatatattaaacatttctctaattttttccataatatgtatttggaacactggataatctgtcttcccttgcacattgttgcacatgtttagccttctggcaggaaggcaaaccccgctctggaaattcgtgaatacgtagtttaacaagttttaatctgatattgtccagtattttatattatataaataattcgttttttaatctatcattatattaattaatattggccatggataatacaaactggttgatctttatattttgagtgttaacattgacaaactgaacaaatacacattttaaaataaatggatcactccttttctatagatacatgtctttacagtaaggatgatttccaaacagttgaacaaacgagttctatagagtcttttatacgttacggaaccgaaggctcgataaataaacagatcgagcaggaacttggaacagtaaataatgaagaacctaaaaatgacaacaaaaatgaaccaaagaccaccatacttaagaaatgtgtggacaatttgtccaaaattatggtctccgaaaagatgttcttcttcagagaattcttccagttaaaggacacctttgaatattcagtacacagcagtatagattcatttcaccaagatttatccaaagttttagatgaaagtaagtttttaaattgttttataacccattttaggtggcagatcacaaaccggtaaggacactttttacaccaatgagtgcccgaatgttgagagaaatatccataaaaattgttctattcatcgagtatctgagacttgtagtattagagaatctataagtgaatctgaaagagaatatgaccttgatccagagacactagaaaaagctttattagtatttgttgactacagtcacaagttggcagtaaagtcaattgaggataatagacatctgttggctgagaaacttatttgtaacatttttaggaagttgaaacaggtttatgaaggggattatggtcacaactataccaattcactggattcaacaggtcgtcaccctctttttaatttaagttttaatctcccctctgggactccaaacagtataaaaatgaagctcgaagagatgtcaaaggaccctttgtatgtcaaaagcttggctgagaggatattcatatttgatattatgaacaagttcaaaatgttcgacttgacagagttatgctttaagttcaaacaaccactaatccgggaattatggaacttatcggtacattcagtggtttcaaaaagtgatcacaaactagaaaggttatttcaatgcagaaacagtattttcaccacagaaaggagggataagttcttttacaataaaaatataccgcccaaggtggagtcctttaccaacactaatctctatcctcaactatctgttaatgaagattatgaaaccaaacactctaatcttcaaaagttatcagatttgaacagtgaagttatgagtcaatactctaactctccgaggttaggctctgatagttccagatcatataaggacttcggttcatctagggataagtggcctgaggacctttttatgggttcctacgagactttaaactatattcttaagaccaacggtctttttaactataacagaattgatcttctcaagggtcattttaatcttaagaggactgagggttctgatttctgggtgaaggagaacagtaagtttcattaattgctaaccacttcttagataatcgtctggaaactttttactttttggagaaaaactgcgtttcaataaaggtcaggggcaaattgccctgtgacataataactgctttaaccataatttcacagactgagttaggtcctgagtgggtttcatttttaaaggaaagtcaagatctacacagcttttccaaaacaagtcgtatttctagacaggtaaaacatctataaactgagtattagctggtatatataagttttacaatgtacaagtgttatttactatatacaagactttgtataggcaagtgttaccatacacaagtgttagttactaatatataagcgttctgcgtattaaaaattattttagaaatatgaataccctgttgttggacataaagagtctcttgtttatgccttgtcaacaaatctgcttgatgaagccaactgtgttataatttcctgttgtaaccctccctccaacaagaaagagtatgaaactgtggttaaggccatgaagaagggtggccttgaggattcaagcagctttattagcctggataacaagaacaactgttccatatctggctacaacataaccggcaatgtgccaaaaaggaagaatcaaaagtcaggcgatatttgtttccttctcttccccttcggtgagaacgagaccctaatggaggtttatgggaatgtaactcaggaggttaaacttgttcctatgaagtttgtaactttcctcattaagaagattatgcttgggatgataaggaagcttgcgaacatctctaagaacttctccgaaagcaagtttgcggagctagtatccaacaagtctgagttctataactggatggttaagatttaccaggatcacaaggttagtaaccctcaattgcctaccttcgaccatgatacgtacgtttacacctatgaccctatcgcaaagaattaacctcagcttattctaagaatccgctctcctattctaataaacctcttcctctttttacttttgtaggtcttccttctcatgtttgtttcccaagttctaagaaggatgttattgcagttgatttcattttcttccgggaagtcgtaatgcagtttaaatatttgagaacaaatcggctttaaaattaatgaagtattgttgtttattgagtttaagattctgttacgtttaataatttggcaaatctgatttaattgagtcattttaaatttattatccagcttacacatttatccttcttgcttctattttaatcactctctttttcaaattcatttttatttgaaatttaattgtatatattcaaattatattaactaatctcaatttcacaaactacaaacattaagccctacacattaactcataatgtaatgagaacattaaattttaaaaattagttaaatctacaaattacagccacaactttattttcatttttcggtttactgaggataatgtgtaggaagccacccaacttgggtccaactgcgttatgtgattagaattctaaagctttaccttttgaaagtgaatcacagccaagcttcgtcccgtttacaaaatacaatgacattattacgagtcctacttccttcagcaataccctgaaataatttatacacactttgtttcataccacgcctcctttaaaagattaaatgtgtactcattggatattataccattatttaatttcaacaactcgtatgtttccgagttatcaactgcatttcccggatcgtgcccgtttaaattagatatattacacgagccaactttaagactctcgaggtttatatgatctatgaaagataaaaggttgtgtattggagttttcttctcggaaaattcatttaaattcttcttattcaattcgtggatcatgtccttgatcacttgcttattttttatcggttttttcttcaatgtgttaaatatctttaccaaaatctctctctgactttccatcttctcatatctatgctccaaatcatcactgtttgtctcagttttgtgccgcttttctgatgttccatgtacttcgaggttctgttcctgaactaacttcttgatgttttcattaaagaaattaaccgagtattctttggaattcacaggaaactaaggagtaatttttagacttaaatattaccttaaaatgctcaaatttagtataacaaggtgaaatagtgacctgatcacctggtttcagccatgctctaagctctgtcaagtctagagagttgaagatctctgatgaaatgatcacagtgacgggtgttatctttgataaattagttagtaaccggtcgtaaagcctagattgaggtttcaaatatgatgtgtcgagtagatttatttccaaagtaacagactggtctgagaatgttattattacttaatcaaaccttcattgcgatgtactatattacagtttgataatcccaaagttctaaaaacctccaaatcaagctgtaaatcattattgaatgcactaaatgagatatttaaacatacattgagtgttaacacccctttggaatttatcacaaaattgatctttgatttataattataatatatatttaaaattgacagtcttttaggaaccaaataatttacaataaagtccagattgaccaaagattcaagagtaatgttcgatgcaacaaagcatgtgtcctgtgtaaagtaaattagtcgtttttaataaataacaacaaaagtcgaatacacactaaaagtatatatgtaaaaataccctagaattaaaaagtttctctctgaaggcattagcgaaaggggtctcctggtagggatagaggacggtcgcctaaagtgtaaatgttaggaatctcagcagattattaaatcattgaattcagaataaaaaacatacgctcttgacaaaatttggagaaaaaataacagggagtatttgaggaaaaaaattttcaaaatttggacccagaaaatctaaatgagactgactaaactcaaagacatcacactctgatggaagtgacaatagatgagtacgaaccatgattacaaattacatattaaaacacgttagatgagtgttttacggaaaagatgtgtgggaccgttttaacttgtgcggaaaattgattaaagttattctctatctaagtctgagtattgttatatgaaaatataataaattaatgtgtggaataaatgaagaaaagtaggtaggaatcgtgtcctaatatttaactgggtctagtgaactaaaaataaagcaggttatttgtttgaaaaaacaacgaattttcttttttctaagcgtcaaaaaataaaaaatagataaatatatatgttatgcaattatgatgatgtgaaattgagcgttaggggttaggcgtgacgagtgcaatgatacagatgaacatgcacacaatttgttgggcgagaacgctttgtatggtgaatcttcctccatctcacttcaattatagttattggtctttttccataacatttatccggttatttaatttttaatatttggatcgctaactagtctgccttttgttcggtttttataatataattatttgagatgttgtccagaaataccctcaagttcttatatttgagtttcttcgttatctcttgcgttaatgccgcaaaagaagaagagaagaagaaggagaaaaaggaggatcttacagttgatgttaccctttcgtcatgggaaaatgttacttctactcccgaggctggcggtacattattgaaagccaatgaaggttaccgtttcaagacacttaaggtcggcgacaagactttgtacaacgttgacacctcaaaatacgatgcagtacacctatacaaacttacccatgattctgatgaatggctaaagctccttctccacccagccaagccagtgatgttcaagaagaagtcagacaaggaatattccgaagtcaaattcgaaacctactatgatgatgtcttgttcaaggggaaatcagccaaggaactcgatgcttccaaggtcactgatactggcttgtttacccaagagagcttcggcactgggaagaagtacaccttcaacaatagcttcaaaccttccaaggtctcattcgacaaaaaagatgttggaaagcccgacaaggccaagttcctcgacgttttcgtctatgtcggctctgatgacaagaaggttgttaggctcgactacttctttggtggtgactcaaggttgaaggaggtctacttcgagcttaaagacgacaagtgggtcaaaatggaacagaatgacgcaaacaaggcattgcatgccatgagcgattcatggaaattggactacaaaccagtcgtcgacaagttctctccccttgcagtcctcgcctcagtactcatcgtcgccgcttcagtcttttacaacctttaaaacccatgtgcgtaacaacttatcaacgtttaaaacaatattgataatttgtatacaattacagcagctaactaacttaagtcattttatgccacttaatttcatacccttcgacatatctatctagttattaccagtttacagttttgatttctacgtttttatatctcttgagaatagttatagtaagcaggtgatagcgccgcaacagattttagtaaccgtagattcctcttctacctcctccggtacgttgttggcacctgtagcatttaatttgaaaattgtactaatatgttaactagaatttatataaaaaattactgaagagaaggtcgaattcggagtaggaattgaattcctcttcagcgacttccgcataaaaaatctcagaaataggcttggaacgaagccttaagtccctaaggagattacagtactgaaggaaagtcgtcttgacccagaagttggaagtgaagacaaagtaataatctttacgaatttgatattcattcacagaataaatctcaagcatgaggtgtttcccattcttttcctgaagatgtatctcaatgacaccctcgcctccgactccattccagataaccacacagttgtcgaagatcttgttgattttctcactgccaacagatgtgatcattaacgtctccaaagtgtaccctgagtatttcctgactgttatgttttgattaaactccaggttgtgaaggttaatctcgaagttacacagggactgagatacacacaagcaaaaaagtgggaggaataaacgtttcatttcctaatattaactatataagttatttggtctgaatgttttttataaatagttttatataaaatattttagataaaatgtataaatccagaaacaaaattagagaaagctagctcaaaagccttggaaattaaaatgttggttgagatataaattagaaaaaaccaatttatgagaattttatggaaatgttttactgacagattattataaaaattttgagaaattaaaaactttcatcgaaaaattaaaaaggaacagcgacatattaataaagcgatttcacttaaaagtaaaaggtaaacaaattgattaatgttgataatagttaaatttaaatgtaaaaaatgtcattaaagagattaatcaactttaattagtggtggctgatgagtcagtattttgctgctgcttatgcttagatttacttttgaaatatttcctttcgtgtgttttattctctgaattgactgcgttattttgtggcttttcattcgcggagttcctccagctctcatcatcgtccctaggacgtggcttggccctgtgacgagatctacgagacctaccagagccactgcctgaagtggcaggcttctcagttttggggacagaaggttgtggatcagaaacgccagttgtaggtgggggatctgtagaaggtgtggcgtttggaggttgagaagttggaacctcattggatttatttgggtcaggcttagtgaataacctgtcctttttatccttttgaggtttcgcatttgtgtttggttgattagaatttgcattttgagcattagaagacgaactagtgtattttctacgtcttgaataacgatcctttttacgcttctctactccagctggtaaagtagttgtgagggtttcacgaattgtagtgtcaagctggtctgaaagtgtattttccagctgatttgatagtgtgttgtcgatttgatctgataatgtgttttctagctggtttgtaagcctattctcaagctggccgacaagtctttcatccaacttgtttgtttgtgaatcttgtaaaagaatggagttgtctttgaagttggttaaatccagaaaaggctgggacagcttatcagatacataccccttaattgttagaccatcgtccggtgctctatctgacagaattgagtgattaagggtgtcaattgcagttgtcagttctgcctcattgtatccttcacttttgttatcaagccaattagagtccgatacagtaggcgaccctaccatgacgtttggcttaaacatttgaggtctcgagctcttcagccttgtggcatactgctgaaaaccttggtaaatgccgttagggttagctggatatggaactgagggtggaggtggaggtggagactctacgcctcttccaatgaagttggtaaatcccagggggtagttacccttcattccaggcatcaggaagtcagtacccaggatattgtcagagtcttcgttgctggaattcctgaaagacaaagagtttgaatagctgctgtcacgactactatggaatcctgggcttgcaaccgacttaacactcgaaattctgtgcttgaacttgtacctagtacttcgaggttctttagaaaggcgatcttggtcatttgtaacgctggaggcttcagagatacgattatttacactaacatcgcggttacttgacccgagtagatctgggaatgacacgtcgtccagtgttccactgcatatttttatttaattagttaacttacgttttagtttcaacgtttgagtcgtactttgcttctgacttccaggcgcttccggcagtcttaatctggctggtcgtgttaactgcaataccccggacactaacacttatacctgaataaaatgttaacctttggttgtatatataagcttacccgtcttttttaaacatttagataatagcctttgacccaaggatagggactcgaggcccatattagacaaattttcctcagaattagtttcattattccaatttttatccatttttataaaagaatgggttaattacagacaatttgatgaaaataaacaaaacaaccaatatacccttaataaaatcccaggttaaggcgagattacaaatcgtatatctaaaagtggtgggatttaaaatgttttaatttaaaaatgatatacagcgggagtcgatagggaatgagccttagaccagaaggtacccaaaaaacaaagttttggatttaagggtaacagtttacaattaggcaaaagcctagtaggaacgatatgaaaataaaatataaatatatattttataaacgaagcgtaagcatgaaggtatctgggatattctggatcttgactttcacatgcccgacaaccgacccacggattaactaatcactaagggtaagtcgaatacatattaattctgtccctcaatgacgtttaaatagtggaagtaagtatatgatacgaaattagatcccttatatattaaaatattgtacacatcaaagtgtcacattcgagccacctccccgtatagttcctgaaaattctttcaacttacttataatacctgtaattttctattcattgatttttccttctgtagcaagttcaactgatatgatattctctcctccgatgatcttctttccacctgttccatctccttaaaggaattataatcatttgttaattgtacaatggaatcatacatttcccctatttcaaatttatcttttatttactcaccaatttctttgaggattttttcctctctattacgatatcctcccgttgacacattatacttgttttctaggctttttattcttttagagagattctccaggtgtttctcatattccttacatagcatctcctctgctaacttttgttcctgcaatgttagcttttcacatggcatatatctcttttggagttgagaatacttaaagttatccgttttcctataaaatgtgtgaactatgtatagaatttaccattctagcgtcaagttccggtcgtctaaacctcttgataaaatttcagcttcagcatcaattagcttccttgcttcctacaaacatttataaaattttttataaattttaaaagtacctcaattagttttaaatcaaaatactccttaggcttgtactggtctgaaggtctgccgtgaggaattggatgttttacactatcatatgctagtaaatttacgaactcttcatttatcaactgattatacttggattgcgattcattgaatgtattttctaggtcattgacaagcactattgagttgaatactactggtcttgggaacttcctctgaataacctgggtctccaatcgtgccatttcttcctgttttttcttctccaattcttgcttacgcctttctatctcctccatatccaaatcttgttcaactacttcctgttccatggtactaatctcgggaattgtgacttcaacgttcctctctggctcagggaggtttgacaaacttgcctttacgtataatcttgccatatccagtctcgccctaaaattttaattattgaaatttaatatggtttataaaatagttttagttagataaaatttacttggatccaatcgggtcagagtccgaagcgtcatcgtatactgaaggttcacttggtcttggagtaaaagctgctgaagacctcgatccaaagatagttaggggtgtttgggcctaaaattactatttattctctaaaaaaaagtaccatgagctgtttaattggatttggggtctgaaattgtgaaggcgttggaggcacagggaatgcggagtctggaaaattcatttctccctaaaagtaattacagaatttttaacttacttccagaggtgtttgcaatctatttgccattgctgctattctggcttcctccattattgatgtcgtcatcggagtccttgcgacggtgctgttggctacattttccaatagctgaacgtctgctcccattttgattatctgattctaaatacaatttattaaaattagaaacttactatttcatcatctgtcatcgttggttctgggagtacaagcttattcttcaatgtcttagatttgtcgtacttttcaaaaattgacattgcagctggagtgtcgtcattctgtaatctctttaacttccttatatcatcttttctcaatttattcatttcttggtctcggcgaattccttccagttgctcaatactaagaacaaattaataattaataaaagtactttttaattgataggtttgctggtctttcttcatctggaggatagaatcccttcggaggttgcatttcaaacggtatttccttttcataatccatcgtaatttttttcattttgaaatttctgacatttattcctgccgattttaattccctacgtttttgtaacattgcgatcctttttgattgttccaatgccttctcacgtgccttccttttagcctttttaccacgtgtgttagctaaacgtgctcttgcttcagccaacatttccttttcgtcatcatccatatccacagcgtcagcccttgagggcttacattccaattgggggtcaatctcccccggtctaagttttcttggatcaaattggtcatcctaaattaaatttaatattttagtataaatcaaacctcttctcggccttgggcttgatctaggagacgttcataatgttggaggcactgataggctgttcttcctattaatggtccaattgttctccattgtgtcggaaataattttgccaaatgtagaagcttttcttcctcctctcttgaccattcggtcttttttatatgaggatctaaccactcaaacctaaaaatgttattttaaaacaagaacttatttgtataaacataccatcttgctttgcattgcttcgctgatttatttaccaataatgatgagactctggaccaattattgagtccatatttcatgacagctgccttgaggacttcatcctctgtgtttttccagactcctcccttaatttggatgagcatcttggaatatacaaattaaatataaaaataaattaatttagtttattttaaaaaattaaatttaatgttttcggtaaataatttaatcacatttccccaccccttgaaatgctgaggctcttcattttaagcacattataccgaaattttcataattaaaattcttatattttacattaaatttttactattttctggtccaattaatttgttttcaaccatttatcacctttgtaaatcatcttctccaggttcaagattccaccttgaaattttgggttttactagtatttttactttccaagaagggagttatcttcttgactatgtagtctaatctcgactgaaattatttttattttttaaaacgccacctgtttgtttctattcttccaactataataattaactccaaccacattccagcccatatctttaagaatcttatacttaagttgtgttagagcattaagttccttcgagttgtggaaaaaatgtgtataaccgttcacctctatggccacctacattttttaaatcttagttaggttacgtttagtttcgggattgcgtaatccagtgtgtacggtcctatctttagttcagatttgtgctttaatttaagttcatccagcaatcgcccgagttttaacttgatataaatgttaatttagtagaaatacctgcattttggatgtgtttggcgtgtatttaatgttaagtttgacaattgaatcaaatagtgattcatacctctcagagaaagtgtccatgttatacctcaaaaagtataaacaaatccccaactgttgcacataaataacattttaagctacctggttcacttcaatctcaactagtgatgaaagtttttcactaattctatcgagaagtgagtttataatttccttgacttgttggtcaactgaaatagatttaagataatagtactaacagtttccgtccaaatgagatacaacaattgataacagacagttacatagttcctgggagccaaaatgatacaaagaagagggtattccctgatatagcaacttcatatacaattcatttttgtactgaagaaacgacaatgacctgaataccatggccaaaaggcacttatcctaaccattgttttatgaataattcatcacttactgaacacaattcctgataaatacactcattttcgagaaatttagagcaaatcgagtctaatattaactggtctttgtactgcagctttgaacataggtgtagaataaaacaaaggtcaaaagtagagaaaagtgaaatatcgcctggaatttttgtcgaaaccagaggaacaaatgtatttatattcaacaactccaacttattaaggtcaattaggtactgggtcaaatttctcggatcaataagtttatgttttcgaagtattatgcgattaattacagacaataatgatggctatatagttattgattgttagatagaaccttacctttttgtatgatactttagcaagtgaatgtattatttttaacaggtctgatgggtctagagtatccaaattaaacctaatcttgtcgcacaggtggtcccataagtttgagtccctaactttactctgtaatttaaataattttaataagatttaaacgtactctactaagagtgtcaaaagagtatattatctggctattagttaattctccaactgcatttgatagaaaagtggaagtatcagtatgtgtatggaatctcctatatatactgctacattttatgaaattaaattttgacataaatttgtacatgaaaagttataaatatgtctgaatataaagttatttttccattaatttgtcagttaaatacaccacacataaaggtgtatattaatagaagttaattttaactgaatgtaatatatgattaaaataaccttcagaagatgtgtttctgatggctttaaatcttttttaaacaatattgataggtataagtccctgagttatgcagataaaaataaaatattatcgcaactcgacttgaaggtacacattaatttattaatcactatttgaaagtttattattcttcaaatttaggatgttgatcccaaagttatctcagaaataaataaaaaattggaccttcctgataacacacatgtatctgataagaatactcatgtaggagaattcgaccaccttaccttcataaaaagggaattgagaagattaaagacctcacccctaaagcggaagcatcttttgaggaaagaagttgccctaaaagggccaaccaagttttatatgggcattgatccgactaaggaacttgaccctattgaaataaagtaattctacagctattaactataccataggtcacctttattctcatccgaaaaggaatgtgattctctggtttcggatgttaagaaagcctcaagatatgaactggtccaacaaattttagaggattcacgtccaataccacaggtacttcctggtttaacaaaactttcagcatgttctaactgataacttcttggatgttttatcgagagcaatagaagagaatctttcaaatttagagtttgttttttataaataaagttttataggaggccaaccttggttaacgagctctcagattacaggccagcttacgccatgaaaagagctgcggtccgaaatttactagtcaacaagtgtgttagaaacgcttttgaggagagtagagtagagaagttcatcgattctcagaagacaatttacaatcaaaggctaaatgttagtaatatttaaattaagtttgtttagtcgccactgccacctgaggttttagagcctttagttgcctttagaggcgatgtttactattcattttcgcctatgaaacggcttcagcagaagttaaatggaattaatatactagttgactcgatttctaagggttggtttaaattgatgtttttatatttttaggtgaggatgttttgtcaaacctccccgaattttccagaaaaactgattacccatttagtaactattacggattcaaatcttcagttccaaatgaggtaacaggttctatacggatgggaaaggagaatagagatgacgatttgaggtacccaaatctccagtgtgtggcccattctctccctaaggacccaaagtacagagcaatagtatcgcattccataaaggtttttgagagaagcaagggatgggatcaaaccagtaaaataaaggccatcaatagactaattaatgtgtacaacaatatgagttcttcctattactactcgagggtgatggaaaagtcagttccaaccgaagattctagacctaaggtcataaaaaccttaactaggcaggaagtgtttaataaaggacttcgctatatcaaatctctcttcaggaatcactggaaccgccctaagcgcaaataattaattccatattctttttaatacgtttatatttaagtgtttaaaataatatataaaaaatcaacaccctcatctaaattgacagaagtgggattcgaacccacgcccttaaaggactgcgacctgaacacagcgccatagaccgctcggccattctgtctgggtttaaggttggattttcgttttataaaaagaaaattctagtatttgtgtcgaaaataaatttttaaatttattttttattcaattgattgaataattgataaaaatggtacaaagtgggaattcaaagattccacaacccaaacgtgaataaagatactagtttgaataaaattaggatttttgaaagaatttataaatattattacattaatttttagagcttttggtcttagcgatgagactcatagtctgggctaagaaggcctcaatgtgccatatatcttttgagccaagcttcattgtatgggaaaaatgggccgccaagtggaaaacagttggaaccagagaaggcttcactttagttacaagttggtcgacaatagtctaaagttcattgttaattaatgtgtggagcaattacctctaaaatgagatctccgggtatacaacagaccaaaaggtcatagatctgtggtcttacagcagagagtctaaaaaatattctaaaaatagtttcatacgttgatggagtttgcgatgaaagaacagattgtacaatttgagtcacattcttttcccaaggcatcatgaagttcttagtttccagggtaaagccacccatggctatggtttccagtatcaatattgatcttctcaagttccgtttacttgattcggcgatgtttcttagcatctgatcactagcttgagatggtgtgatgtcctctgagttgcagatatttctcaaaattccgacaatctattttcaagatttagagttagtaggttacctcatcatttgtgtgacttctgacccttatacataaacaacggcttcttagaggggccattatctgtgatataaaatttaaattttatgaaaacaaactcttgacagttgtctgacgtgtaaaaacatccttgcatttttgatacatgtttccatagttctacgaagagctgcttgggcctcctggctcagtgtgtcggcatcctcgaaaagaaaagctgtaaaatttaaaattttcaatttatttaatacaaacctctataagaaggtcctttcgaaaaaaagtttgaagcagaaggtgctgaggataaacttcgtataacatcctgcactatgtacctatctcttgatcccaattcttgacatggtactaattttaaatgttaattttaatgtatgagactaactttgaatgtgcgcttcactttggattacaacaacctcgctagtgtccttatatgacaagacgtcggttttaagctaaggaattccataggaatctaagttaaaaataccttatccaccttatttccaaatactgagcgtagagtggctagtattctgcattttttccccgatcctgagggtccatagaacaaaaaatgcggtaattcgccatgcgatttattaactatctttaataacagctcactaagatccttgtgtgatgtgaaatcattcaggttctttgggcaatgtttatctatccacaacatatatataaatctcaagaatactattaaaaattaattaatgagaggccacacaccaaaatcaggatgtctcaaataatattagtcatcttctggtaaaatacccttggaagattctcgaattttttccaactcactaaaaaatcattatttttacaagaattgattagcttactccaatctttccattatcagtttatctctttcatccgggaaggattccaatctttgatacctattcacacttaatttatttcataaattacctttcatcacaactaaaatgtaattttgctctttctaggttatcttttttagttccaggactataactcagtgacttcttgagcatcattttaaatgattccagcaattcccctttctgaagcattaattatctacaaatactttacacaccttatcttccttccacttatttaagcattgatttaaattgtaacttggtagatccttgaatagcctagctccgaccttttccaccacctaaattttcttaaacacttgagtttacctgttcaaggtccagattaatgttatctgagtccaactgcctcaattttgactcaaatagctccactcttgccttcaaaaactccctagtgaattttttgtatatgtaattcttgttctctaagtatttattggtgaatcttggatcattattcagaagttcttcttggagcggttcaacttctccgtttctgtaaggcattttaatcttttcatacaacaaatttagaaagttatcctcggctagtttcctcaggtgtgtatctcgatgtgatttttcatcctttttgtaacgtttatttgagaattcctttatttttgagtgttcctctaatcttctcttcctttcaggacctgtttcttcatccttaacatcctcttttgtctctaatgtcactggagttgatgatttttcagcgagaagttctctcataaattggttaaatagtctctttctatgcgatttaggtatattcttgtatctttgatcaaatattagcttgggtatacactaacaatttttgtattctagatactttacctgctcataatttacatggtttggaaggtttagtgaccttaccaattctttgtatttatcggaatcttcttggggaacttcttcatttttttcttctttaaggtcttgtttttgatcatttttcagagaaggtttctcccatttggtctatttatatgaatgtgtttccatctaaactgtagttaatgagcatacctctttagtctccttattgtagtaatacttataattttttgttgttttgacctcatacctttaatattttattaaatttatttacttaccagttggattcctcaagttggttccatgatgatggaactcctacgtcatccatatgattcttaataaataatccttaaattttagcaaattgaactttaaagaatatttacattaaatataaatcattttaatatggtacaattgaaaacacagatttaactaatatataaaggcattttataaagatagattatgcagcaatgttgtttatggtgtgtgttattgactcgatgagggcgttcgtttgcggtgagtagtttggcatctgctggaacctcggattagtgaaaagctccaggaccacaagcgatactccccaaggacacttgcctggagctataaatgactctagaagcactcgaagtataacgtgtttggtatcaaggtcgtttttgcattcgtcatacatcgtgataatcagacaggagaagaagaatgtatgtgcgtttggatccctcaagtgccttacaattgagcaaaccagttgatacttggcttttattggtagtgccttaattaaccacaaaaagagtaatagtctggcgtttgtatcatgaagatcttgcgacacatctaaaattttgttatgaaatgaataaacatatactaaatatacttactttgatgtgttgtgacgatttccagtgttagagaattaaaagtcattaccgattgcgagggcgtattatttacttgttctgtgagtataaggcatattgtttcaagatcctggcagcttaccaaagatgatagtccaaatttagatagtttaactagaaccttattgattaaaagcgccaatctatttcttgaaaccagatttgcccatgagttagacacttttggtgcaactttcatctcaggtatcacgtctactcccttgacccccaagaaccccttaagaactgatggccctttctgccctacacttgatgccagcctctcaattgcaaatgttccaaagaagttaaggtagttgatgctgacaaactctgggcacagggtagaaatgtactccacgcagttgtagtacactgatgtgaagtactctatataattatcactgtctctcacaggatccttttctgactccaaattatcatcttttgtcaaaacgtccttgttttcacttgattctttggccgtgcttgggcagttgtttatgtctgctgtatatattgagagtatgttgaatattcttgacagcaccttccaacactttgaagaccttagggcgccgttaatcagggttggatggaccaacaacctcatgaagaagaatgaaaacccaggcactcttgtcggattaacgtactcgagtgcgtacaaaaatgacagctttgaaaaaagataatttggctcgtcaaacctgtcgaaatataccatcagtgatagccatatgttatatgagctcaggtagtgtccttggtgtactattatgctggatagggatgataatagcttctgcagtgcgctacatggcggtatatcccctgaccctccaaccaacctcaacatcacgtcaaccatcttgcacagtccctcgaggcaatcaaacagcgttattggtggggcatttagtacttgtgacgaagaagatgcggaactgctgcttgagacagaatttgcgttacttgtatcactcatgctatcacttttagaactctggtcgttacttggatttgatgaggacatcatcgaactcgagtttgatgacggctggagaccaccgtttggaatagttgtcaaaccattaactttctggttatttgggtccttgcttgcatttgtcatgttgaacaactttgaggacttttcaaaatgtattattgtgtacaggcatgatgagaagaatgaatcggtcccgccttccattttaaatagtgactggaggttgaacttttggaagaagtgtctccatgataacaacagtgaatctccttcgacatttttagtacattcaacccattttccaaacagcgctccaaacacaaacctgtgggagtcatttattggtgctgggactggaactcttctcgaaccgccaaacccatcaaatagttcatctgctctctgatcattataatctgttcctggttgagcttgtgggtttgagtttgggtttgttttgaaatgatatatcccgtacagcgtatttaaattttgctttaaaatcgttgtcaaaacaaatattgtcggtttgggctcattttggacttctactatatcctttagcagctttgcccaagcatcctttattaaaactcctgggtatgttttgcatggttcagagccacatgaaagggttgatatctccctcaccagaggtgctcctaccgtaggtggtgctgatttctggtctacaagtgctatagctgttgaaactatcgacatttctatcgcgtacacattttttcctctttccatcgccagtatcagataatgtgttagttccggccactccagcaatttatatctcaataagcctgccactactaatatgttaaacaggttgttattgtggtctagtggcaatgagtagagcatgtttcctagcatcggcttaactgctgggttaatgctattcaggccgtcgagtacgcaaaggaggacctcgatattcagacttgagtttgctcctatgccttcgcacagaaacattaacaaacactttgcgatagccaaggctgcaatttctctgaatcctgacgtctccactacgtttatgcacctcattatacctgagaacacttcgtggtcgtggggcaggctgtacagaacatggagtgagtgagtgctgaagatatgctccgtcctccccggctccaggcatgtgttgtacaatggaggcgggaacattgctacgtctctcagcggttctcttaggtcactcaggcactcttcaaagagtgccaacgcgatgtgaattccgtctgaaaatgaattaactttcataataaatacataaattaacatgtgtcataactgaataaaaaataactacacagctatttaaatacgcaaccacacaactacttaaaaggataaatatataaatagtattatcatgttttgtatgactcacgtggtggtgattgttgtattgatgatgatggcatttgattagctggcgatgatacaggcggttgtcccatcattacctggccttggaactgttggttcattaggttaactggcatctggtgtccttgcatggaatgttgtgacagtgatgatggactgtgcaattgaactctctgtggtgtcatccttgagtttccaaatatcgatttatacactaccaaagcatgctggctgttatttctagtattccagttgctaattagggttggtaagaagttttcgggcagctttggttctcttgatatggatttgagtatctccataaagaggaggtcgctttctctgaccgcatactcctgtgtgattttttcgactacatttacgcaaactgccaggttatcttggctcagcacctggactagttgttccaccaggacctgatcattacaatcctgtgttctgtgtgtttgtattgatgaccttaggctttcgtgaaaggctacctttaatggctctttacatgtcgccaccactaggtttgttgccaaagtttcaaacatcattctcgttgctcctctggttatattttcatcctcctggtttgaaaaatccttcgttattaatatcttcgtgcacattcttgccagcgaaagtgagtgttcgcatactactgacaacacgtgccttactgctctctccactgctattggaaccaatgacctgaactggggttgtatttcgaacagtgctattgacggtgagataacaacattgttatgcaagctgtgcatcatgttgtctatgaacctcgtcatgctcatgttgatttgtgcgtgtgcgaagttggccgtcgttggtaggtttactgcgggcggtggtgtggacacattacttggtgatcctgctggaactgcattttgggcatttggttgtgcgttattagtcgcctgatttactaaattgttcaagttagctggcaaatcgtgtgaatatattgtgttaaagttcgaggatgttgttgtcactgtcccttctcttataatctttgacaacagttgatttaatttttctcgatctcctgggaattggacgttattttcttccaaggtcgtagttcctgtttgtacaccatttggttttggtgctgtcgaacttgttgttgatacagcgtttgctgggtttggtgtttcgaaatctgggctattttgtggcgggctttttgatgttagcaaattagttttatttgcgtagtccttcatttccaaatttaagtgcttaaataacacttccacttcgaacactaagtttgttttaagatttggtaaatctcttatttccatcaagaatgataacatggctgtcgtccacgggtttggtggtttaaatattttactgtttttgattgactccattgatttacatatgaaggggagcactgccaccagatatccattttcgtatccctttgtcagaactgcctttacatccagttgtctgtatattattggcacatttcgtgccaaagttattcttcctaaccagcttcccaggtttttcaacaatgttctgtatgccaagacttccttatgttgttcaacgttttttaggcaagagtttatacataagtatgttatttgtattgcctggtcaaacagcttcgggtaattcatattttctataaagttggcgaaaacatcgtgaaggttatgctctttgcttgctctcgtgcggataatgtacagaaggagccatgtgttgtactcttggtctagcagtgatgaaacttcgctggctttcttttccacgtcgtctgggcacatgttgttgaaaattgagtaaacgtgatccaccaatgaatctggaggcactttagcgtcaacttccacatctcccattatcaattcccactctccaactgatgcacgaatatctaacccgtatgaagggggtgacgcctgaccattctgttcaggtttcggttgggtcacctcttctacctgacctattacaataccctttgcctgatcaatatatgtgctatttttcatgttatcggtcatgatagtttgtaacttttcgcaggttttatagagctgagggaaggtttcctttacatctgggatggataatagtgagttagagaaccatgggtatgatgcgatggaattttcaaattgtgaaagtgctattgttccaaattggaacatctttgaagttttccctcttttcagagcctccaggatacatctcgatgctagcagaagaagtggtccatttgatagtagcagtccatgctttatcattttcccaaacaactctgctgttattgacaactcttgcaatggatacttcgggaagaatctacactcgttaaacaagattttaatcatggtgttgtatacgctcttattcctggatccttttggtgacgagctcaggtgccgcatcacttctatcatttgatcagttgttatttgtgacacgtagagcttgtagaaatatttattaacgatatcttcatcgttcgtgtaatcagcccagttgtcgaaatccacctgatcgaccaatggatcagggtctgattttacatttgatgtgttatccatgtttaattaggttgagtaacacaagagattaaaaatagtggtaaattagtataattttcatactaacccattgattttattgataacaggctgcgatgaacaaattttattattttgactacagttttgatacagtttgccttcaaagcttaattttaaaaacacaaaatattgattagtatattcattagttaaaacacctctttaataaatacaaaacaaatatattctgatgaaatataaaataattaaaatacaaaatcgaaaacaatatgaaaacagataaaagtctacagtccactataccacaactttctggtgggtattgatacaccttaggacggatatatgtaaataaactctcgctattatgtatttaaattgaaatttatttataaatattatttttaattggtattttccctctgcaatttacacctaagtcaactataggtgataaattgattatatgattttactatacactggctagcggaatttcattagtttactttttcccgctatttttattaattaatttatattttttagaatccttcctactcagtttcgtaccatctctacaacctttccctccctgatgaatcgtcactgaattttacaacaaacctcccaatgtgagcttgatgttgctgtgcatcctttactacagaatttgcaaactttattggatgccgcttgttgtgttgagcagtagccacatacgataaagttggcatattcacaatggtgatctgtggcttcgtcatggcagatgtcgcaggggaaaagctacaaaatttttaaaaattttcattacctactcttccgcagcatgggaatctgaaccatctgaacgactttttgtaatgtttgcaagttccatttcctggaaggggtgttcctacttttattccttttactgtcggtgttttcctttcatatcgtataacattctttactgaactttccgttgttctatagaattttacatgtttttattatcttacggctcctctcctcttccaaattgaacactatcaaaagagaatagaaacttggtaaaacagcctcgacagtttaaactctttttatctcctaattgttttatttgtaattttaattaatagttacctattttaacttctctaattcttagttgtgtctcacaatcttcacaagttagtttaaattcagcgtgattaatatcctgctgaaattagattctatttcaacttacgataaaatccgagtttaaaagtgacagatttccaaacgttagctgtgatgggaagaagagtgaaggtgtgaactcacacctaattggaacgctacacttttggcagattttagagtaaataattgtcttttcacccaggtctgccaatgtgacctcaatcctatcggtacaccgcaaacatacgatatccattctaaaatttattggtgaaattttaagcttacgagaatgttcctatccttcccaatgacagtttaatcatttccagtcttgaaaatgacaaggagcctgtcctgtcgagtgagtaagttggttgttccggttccttagtttcttctggtttctaaaatctgttatccatacattcaacttacattcttcttaactagtacttctctacatcttaggaagcgtttcctacactcttctggcgttctagtctttaccattttagaaattagtaaccatttctctcttgggtcggtaatccccttcgatctgaccaagccatcttcaagactaaaattgttattagatgttattaagtactcaatattaccatttttgctcctccagggtccatgggatatctaaatttggggattttggagttgtatttttttctaaatcattttttgaatcggttccttccgttactacattattaatacgactgcttttaacagattctgatatattgtatattttgagcagatttttatccaaaaattttagagactcatatattacatacttcctgagcttggagtttttagaaatgtagtctatcaggactttctttatagaatttttaaaatgttctgagagtgtatcatcatctatactgatatcggatatgtccttcacttcgtagtatgttccggctctactttgataattctgataatttggtaaatgatctaaatttgagtttaaattcgggattccatggtcttgcgaaggctctcttgtgaattcaggataattatttatagatactcgatgtaaattaagattaatttttattccttcattaattgataagattgttttatcaaaatctgggtctgtgggctttaataatacatttattgaaactgtctcgttattatacactttttctattgaattttcttgttttggattagtgatgtgaaatgaattttcaaacatcttttggagcttgaagagttccaggaaacagtcatcatcgttcattttattttagttatattacctcaggtggaggtaaaaaactatctacttatatatgatggtatttattgtagcatggtaaaatatataattcagaacatgaatagttgggtatattcagtttaaatattatttattttgctcattttaaatttatttaggacgattcttaaaatttaaataaaaattaacttaaatttgagaagtttactattctatctttattatatcaatattcatatctacaccaatcttcctaacatcattctccatttcttccattattccttttaatttcctttatatttataaattttatttcatgcttttgtcccatatcacagaataacgccatcttcttttgcacctcgatgcattccgtccgttttctccatctcaatattccatccccaaaacatcctgtaaaacaccgttatacatatataatcatacttttaatcgtatttaatatatgtatatattatacttgatcatatactatgtattccttaatatcgcaagaactttagctctggtttgtctacaacctctattatcctttaacaaattatttagtctaagaattttgcttcgtctgtgcctgggagtttgagtacttcgacttatcacgaaactcccctacacaatcttgcagatgttgcagatttgggtgtggattcgaagggcacgaacagtgacaagatgcacgagcttgaggaaatcctagaggacgaatctcagagtccagatgagcagtctgcttccaaatatgaggagaatctgaaggtttttgacaacccggtagttttagaagtcacttcaaaaccaactgaagacgaggtgaaggactttgagaagttgagggctcatgagatggccactgaggacaggcattttgattccttgagtagtctagtttcacagcctgggaactttaaggtcactggaacttctttcacggtaagttttattccaataagcaatttttagacttctgttggcagtaagactctggctgataacagcctgaatgtgaaccacttggtttccggcctcagtggactaaactttggtccttcagaacacaacagtcttttgaatgaaggagttagtcatgggatactggaaccccaagatcttcctcctgtcaatgtgaatgccaatgctcaaaaccactttcatgttctaaatgtcagtcaccatcttagtccaatcggtgatttgaacctaaatttcaacagttctaacactaactcttctagcaatactggtaaagaatgtttcgcgacgacctctaaggatggctctcataatactgagtgttactgctctaaacaaaacgactgtagatgcaccaagagttttgtcatggtctcttctttttgtgacactattatcaacgacaattttttcaatgaattttgtttttacgacgtaaagtccgatcttcgtaaccatgaccatggcttttctaagaagtttggtgaggctgtttatgacgcattcctaagccttaaaagcggcctttgcaacaatgtgactttgaactactgcaggtatgcacatactcaactatatatcttaattcagggaggtacttaaattagaagaattatgtcaatgttccaagtgtcggtaggttgacaaaatgtcaaacaatacctatactagtttattttcattgttcttaccaaatatgactcaaacaggactgacaggtgattaaggtgatatcctttatcaaaatactcaagtatgggtttcgatagctcaccaaagttctaaatgttttaaactaatcttacttcatacctctattttgactgagtgtttttctttaaggtgttccataagttttgaactctctgccacttcaatctttccctttttcttaaattcgctaaacttgaacttgaaattgcccttacactccacttgcactaccactgaggccgcttcgtttgacagattccacaaatttttctaacaattcttgttacttatgctattacctctttatatgtatactttgagtgaactttcctatcttgtagttccggtgggagtatttttgacagtatcgatttgttattggtcttatagctttccaaaatatataaattccacacaaactcctgggctactctggattaaaattttaaaattacctagtttgtataagttttccatattttcctgaaaatccttcggtagttggtcatggtatcgtttaagtccaaaatcgaagtctccctgctgctcatttcccataaatttattcatcgccaggtccattggcgttttactaaaaaatatttattaagtttttattaccttgatgacaatttagggctgtttacttgactcacttttatttctttccccttgggttcaaactggtacactaacggaaaagaaaatttagttgcttctagggacgggaatagcaaatctcttggtgctgacagtgacatttggaatgcgttttcctcctttaataccttaaaatttacatctctcagtgggttagactgggaaaaattgtttaggtgtgtgtataggctagccataaccggtggtagtttttttgaatctccagtcttggtggtatcaacatctgtggtaaatgaccctgttagctcctcaagttgtttcctcagtgaatctagttttgtcagtacttcttcgtttttagattccaaattcagcatctgggacgtaacgtcatctagttcacgtctcagatactcacatttggtgcgattattaatccttcttcccatttcatttcttataatatttaaatttgcctcgtgttggtttctagaggggaagggcggcttcttttctgactctggaatttctgactttagtttattccacaagttaggttcataggcctaaattaagattatctatctttggggaaataccatctccgtatctactatattatttatgaatgcgattttttgcatgaattctgatataaatgagttaacggactcttctttcgacttcaaaaggtcccacaattgttgagatacgtttttataaaatacgtaattgcgatttgcttcctttagacccagggccgttttcagaatactttcgtttgggtagtccgataagtttgatttggaaattttaaatgcgatgttagttagattatataagtggagagaccagttataggagagaagaagtgaaatgaatagttgcttcatcaactggtgatcaccttcatttgagaactcgggtttagttacgttttttacctccaatgaactcatatcctcatccgtttcttcttttaattccacttcataattctctttttctatacatgataaaagtgattcaaataacgagttaaagtaagattcagcgtcttctttgtttgaatccttaaagctgaagtttggcaaacaatgtaaacaggactcaaataaagataacgattcattaacataatttaatccgtcctcagtaggtttaatgaaaaatttagtatccttacacaccttagtaacatattcgagatctagagctaaatttgaagtttttaaattcacagttttatgctttttgggttctttttgaacaaacttttcggatactggtggattaaaaagaggtgtaacgagattggggatagaatcggcgacgttcgataaatccggatgggttttgaccctttcattaactttttcagttaagtaggtctcttttatagaatttaggacctcggaaggttcattcatgttgaaaattaagcgataaatttaatatacatgatacatatctgtgagaaattggattttgttaaagttgaacaaacacagtttcaagattcagaaggacaattttttaaaataattcaaatttgggtaaatagacaataatgttttctacaggaaattatctagagctattgggtttcacaaccccaatgaccattaaatattaaataaattgttttaaagggctgtttttgacagtatcttaattatttgtctgtatatcgttgtaaaaataatatgcttaatacacctaaactcagttacactcggaattgttcaaatgggattgaatgttttattatgccacactgttatttcagctgttgccaacaatttgctcctggtgggcgatcactttgttgtaaagaaattcaactcaatttttagtatgtttgatatctgttagttacacttaatttttaggattcgcattacacgcagctatcgcatcatttcttttttatcacgagcttccaaaattaggagatacgtatttttcttatctagggttgcctattaccgcaacacatagcgatgtgttaaaatcgtacgacaaaattcaggacttcctaaaggtaaagtgggtggtttataattctatacagaccggctcacctgaagttgtcgctaagattaaaagagcataccagattctttcaaaccaagaatctagaatattatattctgtatacggagatgttgatataggttggtcaactttcaatatgtccctttagatgcaaagaatcctcaagattttacaattatcgtacttactgtttcactctcatactactgtgtttctgctatactctgttgcgctttaaacaggtctaacagacttaagttcgcaaaatatgtaagtatttaatttttaatcttccataggtcactgttctatacaacgccatcggcttctttctggaggttgagttgaggtttctgtacgctggtttcatgaaaaacgttttctacttgaataaacttctaccatatcaacacgttgaggtaaaaacattggttgatatacctgcttagtttttgagagctataccacctttcgtgatgatggtcgcttcactcttgacccactcctttatcaccgacatggataagctaaacatgttactatggcaatcagctgttgccactaatggcgttattcttgaaaaaatggcaaacgtggttaatgctacaggttttcaaaacaatttaatcattgcttttagattatctcagaagtctagggagggataatctcaatctgcctgaagatttattcaagtttgagcccaggggttctggtttcggagaattcttagactctctagatgaatctcagaagaagaagttggtggacttattgagcaacggagtaggtttcttattctttcattactttcagaacggcaaaacgaagaaatccaaatcaaaaatcatgggattcttgaagccagctttaatatacattgtaatgttccttataatccgtgtttttttaaaatgaacttaaaatttaatctttaccaaaggttttacgtaaaatacagaattcgtattggtacacatccattatatgtatttgggctatattcaatttctagaagcctatttagggttgtaaagaaagcgtttaagatttaattggtatttgtccgtggaagtttcaaaaacatgaaaacatagagccaaaataaacaaaagaaaaataaattgtgtggaaaaatggtaaaccaggagtaatttaaataaataaaaataaaaattttagtttttagattatatttaattatttggattcttaagataagtaaaataaactacgtattagtaaataacaaaaactaacaatgtacatcccagaagagattgtgagaaattgaaaggaaactggcaaatcatttttaaaatatcaaagatattaggtgtataaagcatttaaaacaaaaacaagaggttacaacttcctaaaataaatagagcacgacgtggcattgttattatagggacgccaatgtcagttgaaacccacagttcagaatttttccacgacaatccatttattattttattaatctatttataaaagttcaatttgtatttatgtgataaattaaaagtttgatgaagcattaatataagcattttgtttggccagagttgtacactattattattttccattttgttcctgattacttagttgttttatagtggttggattttttaatttttaagggttacgttaaacgttaaaggaataaaaattagaatttttatcaagtcatgaaacgaacaaacattaaatctatcaacagtttttatatataaacctcgattgaaattatattataatattttacaaaatgggtgatgtatctggagataggtggagtccatccagttctccactcgcaacagatttaaatgtacccaaaattgacataggtttgttagtcctataaattattgacttttagatgatgtcaatatcggagcaaattatgtgagcatggaaggttcgtcgtacgacaactcgtcagaacaaccgttacttgataaccaaactcctagatcaggagtgtgggccctcagactcatggttctaacgtggattgtaactacgttcctattcttcttctatcgcgaacaaatctcaaaactaattagaaaagttgcaatatttgtaggttttaacagtatatttaattctttagtgcgctgaacaaggctcaatggtttatatatactacgtccttatttacacagggacagtgcctctcctgatgtctacagagatacttacagtcacagcagggttcatttttgcacacatacatggcaatgctcgtaagttttatagtctgaatttggtcttttagttggaattttcatatccacagtgacaagttttatcggttacgccgcggcaatgtcaatatgcttcgtattggcacgatactttatatacgattttgtaaatcgacgctttagatcatatagatattacaatgccctgatgacagcaactgagagggatgggttcaaaatggtgtccataattaggctatcgccattcttccctggtgccatttgtagttatatcttcggaacaaccaacgtgtcatttaaggactttttctggggttcgatcggatatctcccagcactaactttctactcctacttgggttctttacttgaaagccttacatcagacggtatgtaaattttaattcattttctttagaaccagtacacggttggagaaccgtactttatatttcaatctctctagttgtttccattgccggcatgatttacgcatcaaatttgactagggagcatttaccagacgtttagcattaattctaattattttaatctctataacttgtatattacacacccatttatacttttatcttctccgatataagtctttctattcgagttttaatttctgaactttatttgttggttggtgaatacctggtttggtagctccaacatccaattctagcatagataaggcaatcccaagagtatcagaagtcgaagatagaattatgtcagaaacggaatcagaaagattatccaagtaatataaaatgagcctattctaaagagttttattttatctagttaacctcagttgaggagagtgactcaagttccaggtcctgaccagttgcaaagaagtaagattttgccatgtttaaacaatacagaacattgtttttgagtaaaacactaatatcatcctatagaatcctgttaattttggatttaaattagtctataggttaattgcatatgtacctatatatgaaccttaatgtgggtcttcttgatatcaccgtactcgacttttttcgatataacatttacagactaatggtcttaagttcggaataacataccataaacatgaggttccaagtagaatctggtgcagtttttactggtatgtccttaaggtactaagcatgtgtaaatgttgtgttcttacgggtttatggttcattataccctcgggaatattcatctcactatcaagctcctccatcaactgcttactgattcttcccgaggatcttattccaaactccttaaactctttcttaattaagtttctataattatttgttagttattaattttgttaaagttagtgattctgatgtgtatacatatagtgtgttaagtatagtatacctattatattgtacatcgtataatacacaatatacaatagtgtatatacaccatagtataaatatataaatatatactataccttattgtactatatattgcacagtaattactggagttttttagcataggaatgccgttaatacacctcagaaggtataaggttgcataatttttgaatttcgcagaaaatttacctacgaaacaagaaacctccactttcttgaagtccacttggtctgtcgtaaatgaaccactgtatacctcaactccccttagaaaaactgttattatgctctcatttactgattcttgcttgttttccttacgaattacatttccgaacatatcgagagtgatgcttatctgtacatgataatgtgttggtatcagttaaccttaggataatgaatgccaacaatgtcaaagtatgaagaaataagttccctgaagttacttggaacacagcacttaaactaaaatgtttccaataagttatagtttaaattattaattacctaaaatttaccaacttttgttattactcccgtgttgtaaggccactcatcaaatgttacttcttcagttgatgcatcccagacaaatggctctttcaaattttcacacaaaacgacattgtacttcatgattgtcttatcatttattctaaatatgtttttgataatttcgtgtacctcatgattatgaggaggcatgagttgagtgttttgttggaatatatcaaaatctacacagcattttacttaattcgtctatcattgtgattattattgtgatttcgttttcttaccatttttagtcctagcccaaatgttcctgatgtttcctggtctgactttgatgaattgaacatatgccctattgactctatcgagtccaacttaattcctgacccgtcatcaaaacactgtatttccacaacatcttcacttttcttcaattggagtttaattttatgttgtttttgctcatctttacacgcgtcaattgcgttttcaatgagttccttacttattgtgtaaagcacgttcttctcatcaaatcctgtgagccccaaatctaatgatcttttaaactgttttacttactttcggaaaaaaaccggtacacttccttcatttattttactgaaatgaagagagaatttgagggagaactaggatggaaaaaattttcacctctatgaatatgaaaaggcaggtgcagaagagtaaaaatgagtacgaattccattgactgagtataaacatgaatataactgtgaatgagtgtgaattaataaattatgtatataatggacagtattagtatattaatactatacatgtttaatcataagcttttccaagcgggagacctttagtctccttaataaagacgacgacgtaaacgagattgaagatacaaaatccaaagaggatagtgttaacgaggacttcagagtatgagatgagaaattcagagacgatgagggaaacggatgcacaaaaccaattaatgaacactgcaatactgtatgctccatttttaatttcgctggcgtagacctctgaaaggtaaacccaggtgataccgcccatggaaagtgcgaaacctaaaacaaaaccgaaagagccaactgccgttgaaattccgacccaatctgcttcttttccaattggtttactaaacgctgctaaggcgcagaaggcagttgacactgtcataccgtatgtgaggagtgttttccttccatacttgttgatgatgagtgacaaaactatggtacagatgaagttgattatattgatgagcgagcacatgactgtggacttgtacgttcttcccatgaattgtgcgaacaattccgcgacatttgaggttagaatcgtgataccagttaattgttgaagtgctgcaagtacaaatgaatggataatcggcttcctgtacttagaattcttgattgctttgaagaatgggatgtttgatgtggtctttgcaatttcctggtccttgtcaaattcattgtaaatcttatcaaccaatgtgatatcatgtaacttttcaataacttcgcgtgcttctgctgtttttccagctgcaattaactcgtaaggcgtgtcgaacttgaatcccatgtggagcaagattagtccaatcattgaaaagattattgggagaccttgggctgaacgccagatgaatgtatcgatatcagttaacttgaaaatttgtccgtcaggtccagtatttgtaacgatacggaaatggagcagttgccagcctgtcgacaagagctgtccgaatgtgatgaagagtgggtagataactgcgaattttcctcttgattctgggttacaaatttcaaccatgaacgctggcgctaatgctgagagaccaatacccattcctgatatcaaacgacctatgaacagcattgcgaagttgatggctcccatagcgatcagggaacccaaggcaaataaccagttaatgatcatcagtgaccttcttcttcctatcttaccagagaaaccaatcatcaatgaaccgagtgctgcacctatgaaagttgatccatttgctaagccggcatacaattgcgatttttcacaatcatagatgctggattcattcaaacaccatcccaaatcgacaatcgcgaattcttttgagatgttgaagctgacactggagagtccaaagttgagcgaggccaaggaggcgattgtaacaccgatcagtagatgtgtggagatttttggggccatttctttcttttgatcagcacaggttcaaataataatgttaataataatattcataaagtattatacctagaaccaaatattttcttctgatgtgttaaatcgatatctacaccccatgatgccatcaaccttgatagaatcactctcgaagtgcaacaataagagtgccacatacttaaaactttagagattttttttagttatatttaggattgcgattaaaacaaccgtgctaaaatggaaaatattaccacgggctttggtacccatcggatgaaccgagggattataaattaaatttttatgtgccattaggctactggctaattactacattttagcatcatgtatatcaaaatcacatgttaataaaagtcgaaaaataggggtgcgatggcatatttgtgttccatttttatgtacaaaaaatggaatatttgcgatatcccaagctaaaaaactaacatttttacatctggatacaaatagtatccatgattatttacacaaacattttaaaaaaataatttatgatggccctatccctatttttatcatgttgtacatgttgtgatgtggtacattgactttaaagttaaaattagtgggttttaatatttacaactttagaagtttgtcatttaaaacttaggatctaagattttttctaaattttattttttgtatagttcacttctcaccttacctaatcttctataaaatatatcacctgtgtaaacttctgatgactttattaaattaattaagcatttttatttagatttcatgtaattttaattcaatttacttttattttttcatcacaattttttcccctttacattctcttttattcatgttttatttactttaaacatttttacgattgtatacttaaaggacattaattcctattttttatttgtcacggcatatatatcttataaactaatcaaactcccgttctctctcctttgtttgtttacgttttaaattaaaaaatatcaaataggacgatatataaaagagtcaaaatgagtagatataattaaaaatatggcaaatatgtaaggaaaatagccaataaattagcatggacgtgtgactaatttccacccttaatcttcttctttggcctcaattggctacaccttccacactttttcttacgacagttggtggctctcggtggaagacgtgcatagcatcttcggcatatcatcttatcgcagttgtatttctgtgccaagataacgagagagggttcaatgattccaccacgcaacctcagtactaaatgaagggtactttccttttggatgttgtagtcactcaaagtcctaccatcctctaactgcttaccagcaaatatcaacctctgttggtctggagggatgccttccttatcttgaatcttagccttaacattctctatcgtgtcgctaggctcaacctcgagggttatagtttttcctgttaaagttttgacgaatatttgcatcttgtcctctaatttctaaaaataatttaatataatagttataaacaaataaagatatagggatcaacacaaaaataaataaataaatagatataaaataaaataaaaggggactcaccttaaaaaagtgtcaattagaaaacaatagtacgaaggtcaataactagtcaagaaaatagtaaataatatatgtgagttggggatagttaggtatggcacgtcgggcaacttgagaattggctaaaatctacatcttaataattttaatgtacattattttgtttgttattcaaatatatcgcatatgatacaaaaatactgtaatataaatcctaaaatattaaaatccagatattcttcttaaatcgtcacattccttaataaaatccagtaatggtacaagataatggaggtaaaaggataaaactacaagaagagctagcagtattatcaacgtcgctgattaagtccaaaattcgtataaataaaccctcaaacgaaatccaaccttcacacaaaaaggatttggatgtttcatcgacattactctcagatcaccttctaaaggttcaacaggaagttaatacctggataagtttacatataaatgattgaaatttattgtaaaaatgtatgatacatccgtatctaaaggtcaaacccccatgccaaatatggccggagatataaccaagaagtcctatgataaggaaactttcgcgtcgttgttggagtgttgcagtcgtttgtttttttgcgatgaggaaatagtaatagttgaccttttgttggcaactgaaagagcaatttcagagaaggatctggaagatgagataggacttccagaaaaccgcttaagggaacatttatcaagacttgagcgccatggaatactcaccaaattttcaaatacatcagtagctaatatttttcagaaaccccaaagagcatataaaaagtactttttaaaattttaatgtattttagggactcgacacgagaaccttcatcaacacatacatattggagaataaataatcatgtaatattagtaatacactacaaactcacgaagatggaggagtttctacagcagaagttaaaaggactctatgagtcagataagtttatttgtccgaagtgcgaatccacgtatgactccctgacagtccaaacactggaaatggatggatttgatgcacatttcatttgtaagtgcggaacaaaagttgaattggatgttagtccatattccattaatctattgtaggatagatcagcaaaagaagatatctactcctctcagcaaaaaaggtttcaagaacaggttaagagtcttaaaaagtgtctatatgaagcatgggggatggaggttccagagtttcctgtatttgtaaagaaactcgagaaaacactaggtgaatcgaaaactaacaatcttgagtcatcaagtgtggctggagatagcagtagcgttgtgggaggcggaagcagcagcgtagtgagtgacggaagtggaagcttagttaagaaagtaccatcctcaattgtatcagtagatcgaggcaagcttgactcgtcatcttttggaggaagaactgataataaaaaaattaagttccacatgaaactaggaaggaaggactccacacaatcagccacatcacccaagcatcatcatactaaacaaaaggaaaaaccaaaggaggacgctgtttattcacctacattaactgaaaaatcatcaggtaacacatcaatcttattaacttttatagatgtgatgccggacttctacatttcgagcctaaataaaacagtgagccttacaggtgtgtttaatcttttaatctttacatcttagatgctcaacagtaccaacaacacatgacaaatgcagaattcgaggtaagtaaactaccggtggggagttcaaaaccttctttagaattttgtggagttacaggacaaatatttaaatataatttaataaactttttgtttaattttatttgtaaatatatttacatgttatggcacttaaattcaatgtagttgcaagagatggtcgagctcgtcgcggagagttgattctccctcacggagttgtagaaactccagttttcatgccagtgggaacaaaaggagctattaaaggagtctgttatgatgatgtaattttctatatataaaatctcatttatacatatctttagcttgagtcgcttggatgtgtactgtctttggggaacacattccacctagccttccatcctggaagtgaaattattagaaaaagcggtgggctgcacaaattctcaaattcacgatgtaatttcctgacagattcgggtaattctgaacttaataagtaagataattaggtggttttcagatggtatcgctattttcactttctaaggtcacggaagaaggagtagagtttaagtttccatatgatctagaaagagaaatatttttaactccagaggaatcaataaaaatacaggtttcgtccagatttatatttgatcttagaatgatattggagctgatattataatggcactagatgacgtggtttcatcaatagtcagagataaagaacggttggaattagctacacatagaactacaaggttagttaaaaaatatatttaacatatgttcaataaattttaatatagatggctggacagatgcattaaagcacactctaaccctgaaacacaagcgttatttgccatcgtacaaggttctatttacccagatttgagaagaatctccttaaatgaactaaagaagagggatctaccgggttacgcaattggaggtttatctggaggagagaacaaaacggatttttggagaatagtagaattggtaactagaaaatcaaatatatttttagtgtactagagaagaaattggtttaccattcaataaaccaaggtatctcatgggagtagggtaccaaatagatctaatagtttcagtcgcgttgggctgcgatatgttcgactgtgtatttccaacaagaacagctagatttggcactgcattaaatgattttgggaacattagaatacaacatgaaatttatcaatatgatttcaggttaaaacctaacaaataattccttagccctatagatcaggattgtgattgcgtgtgttgcaggaagtattcaagagcatttcttcattatggactaaaaaaggtagttcttaagatttatattcgtttagtccatacttgtttcgcatctgttgactctgcataatataagatatatggtgaggctgtttgaacagatccgggaatcaatatctgagggaaattttaaaggattcgttagaagattcctaacaaacatgtatattaataacggtttgtaaaataatgaatagatataataatgtaggagagttgccgcccctgtgggtccgagattctctacattcagctggaatagatattctagatctatatcctgataattccgatgtggttaaaccgtattaatagatttaaaaattaaaaagctttaaaaatggaagctatcgaacttctgtacattaattcaacctcaactaattttatccataacttggaagaaataaagttgaactcttccaattttgttttatagatatatctattattttccaaattaatgtaccaaattgattgaaatgtgtgaatgaatagctagcaaaacaacgactgaactgaattgatgcaataagcagtttttaaagttgttttaataaattttattatgatttgtaatatttacatgtatattaaaaaatcaaatagcaaatgcattaaagtgcgcccataacttttttcaagaaataagattctacatgatttactaggaatctcaagcctcgagaagaattgaataaatggagaaggaaacacaattaagagggaaaaatgatccttcgccacgttctggaaggaaggatgcattggagatcaaagaaacagttgttctgaaaccaactccaggaatgttcgtaaggaggtcgaaagcttcgttcaaagaaaattacaaagcggttaaattattaggtaaaggttcctttggcgaagttctcctatgtattcatagagttacaggtatccgctacgccatcaaggtcatatgtaagagttccatgaagaagaagggtgatcacgatgcattattgcgagaagtagacgttttaaaatctctagatcaccctaacatcatgaaaatttttgaatttttcgaagatgaaaaatattactattttgttactgaactctacactggtggtgaactcttcgatgaaattgtgagtagaaaaaggctcaacgaatacgacgcagcaagaatcataaaacaaatattaagtggaatcacttatatgcataaacataacatagttcaccgagatttgaaacctgagaatctgattctcgagtcaaagtcactcaattcaaacatccgaattattgactttggtttatctacatattattccgaagataccaagttaactgataagatcggaacggcatattatattgctccagaggttctcaaaggagtatatgatgaaaagtgcgacgtctggtcaattggtgttatattatacattcttttatcaggtttgctaaaaatgttgatttaatcacatttaggttaccctccttttaatgggcagtctgaatctgagattattaagaaagttcagctgggaaaatactcatttgaaatgtcacattggcaaaaggttgctgaatctgctaaggatcttattaagaaaatgttaatttataacccagaaaagagaatttctgcagctgaggtatttttaaaattttattattatttataggctctggagcatcactggattacttttatgaccagggagaagaatattgatttgccatgcttggaattttctattgataatatgcgtagtttccactacaaacaaaagtttatccaggctgcgatgttatacatcggctctaaactactaactcgtgacgaatgtaaatctttaactgcaatatttaactcgatggataagaatggagacgggcaactagaccgatctgaacttattgagggatacactcagtatcttaaggtaattcagcatttatcacataatttttagttcaagggaaagggtatggaacttatggaacgtactcagattgaggaacaggttgacaccatcctccaggatatagatttcgacaacaacggttacattgattacagtggtatgtttacacttctaaatattgtttatagagtttctgactgttgcaatggaccgaaggactctcttttctaaggaaagacttgaaaatgcgttcagattgttcgattttgacaattccggcaccatttgttgcaatgagcttgccaagatgtttggagctgacgatggagggaaggaatcctggcaacatttaataggggaatttgatactaataacgacggtgtaattgattttaaagaatttaaagccatgctaactaaatattctaagtaattaatgtactatagtctaatttttacatgaaataataacatttacagctagatccaaaaagttctccacttaaaacagaattttaataactaaatcattagaatctagctagatattcatgatttgagggtaatctaaaaattatttgaaaaataggcagcggatctttaaatttataaggcgacgaggaaaaaccagcacaagaaagccacacattggatatttattattatctgtaagaataattataacaagcgatctctatcaatagccttttagttgtttcgattttgattttgtatcatatattattaagttttttattaatatataatttaaaggcagaagatctagaaaataataaaatctagcattctcgaatattttaaaaaaattctaaacttgaatacagaaatttcataacgtagaaggaaaaatataaaatggatgataataggagaaggggccagagacaccacatatttcttcttggattcctatgtttacttgtaataggtgtgaattaaaatgcagttatttagagatctgacataattcaatggattttaggtctactaacggggttctttacctactattacaccaggcctgagaggatgaaatccatatcgaaatttgtcaaacctgaaaagctccctaaatattttgccatagatattgacggtacattcttcataaaagatcctgagaaatttaagaggaacatcgcagcttttaaaagactacaggatgccggagtcttacccttcttctgtacaggtaccgtattattaaattgcacatttatttaatttttataattaattaatattcagggagaagctataactgtatggttggattgatcggagaaaaagtgcttaacgagtgtggataccggggcgttcctggtgtgtacctaaacggagcagtggtttatagtccagctggaaatgtaatacattccgcatcctttggagatgcgtttgtgaaagctttccagaaattcatatcaggaaaaaacattgatgataaggtagtatatcaggctcctgaatgttgttattgtattggaaatttttatgaagaagggaagaaattcctggaatcgaaaaacctgtcactgccaattaaaatggatgaaaaagacgtgtcttctatagatatagtgggaatctcgttaccagcgatgaaagtggaattggagaacatgaaagaggggaaggattatttcgcgagaactgcatataacttgataacccagctaacgcctcctaagtgtagcaaaaaaattgctcttgaggcgttattaaaatttctacactcaagtggagaagagtgtgcctacattggcgacgattacaacgacgtggagcctatggaatattgttcactgtcatttgctgtagcagatgcacagaacgaagttaaggagaaagcaaaatggataacttcacgaaaacatgatgagtgcgcttttgaacaggtggtatcggctctattggattaactgtacattatacacaaaacacaaacacaatgcagttcattaagtttactaacaaaaattcaactaaagggtaaactgttaaatggtcaaataaaattttaacatcagcctcaaccaccataattttgtagtagcccagttgattctagatagttcattgtatctgtgaacgaatgtataatttatggattttaatatttaattttttagtttaagtatccgtttaaataagtggtattgagaatatttatgacaatactgagtattgtcatcttcctattaattaatgtttcctctgaccctatatcgaatttctctaaaccagcaactcctccaaaatattttgcaatagatattgatggtacattccatataaaagatgaatcaaaattcaagaaaaacgtcgaagcattcaaacgactcaaacaaaagaatacaactccctttttctgtacaggtatttatctttttatcatataacttaattactctattactaaggtatgacattacttatcatctttactctcaattatttaatccaatattgaccacataattaatttaggacgacatctgcaatgtgctaagaaactactgggagaaggcttttttactgagactggatataacggctatcctggtgtatatctaaacggggcattagtttatgatacaaatggaaaagcgttcgtagacaagtttacaccacagttcattgatgagttcgttaattatgtcgaacaaaataatcttaacgataaagtgttttattacagtcctgaaggtaccttttcgttgaaagaattatataaagatggattacaggcaatcgaaaataatttcataacaactccggtagttttaagtctttctgatttaaaatcgaaggatataataggaataacaatattcaaaactggattgggtggttgtatctcaatgagtggtgtacattctatcgaatatacacaacatgacataacgcatataacatctcttaaatgtgacaaaaaaattggactcgaaaagttattaaaagatctaggctcaaacgaaactgaatgtgcttacataggtgatgatgtcaaagatgtcgaggctatggaatactgttcaatgtcgtttgctgtagcagacgcacaggaggaagctaaaaataaggctaagtggactttagacttaaagcatgatgagtgtgcttttgagaaagtagtaaatcttttgttggattaattgtacattatacacaaaacgcaaaactattgaattcctttaagtttaataacagaaatacaattcaaagtaaactgttaaataatgaaaataaaaatttaacgtcagcctcaaccaccataatttgtagtaacccagttgattctagatagttcattgtatctgtgaacgaatgtataatttatggattttaatatttaattttttgtagtttaactatgggttcaaatcggagatcgtaggaatctttatgacaatactgagtattgtcatcttcctattaattaatgtttcctctgaccctatttcagattttgttaaaccagcaactcctccaaaatattttgcaatagatattgatggtacgttccatataaaagatgaatcaaaattcaagaaaaacgtcgaagcattcaaacgactcaaacaaaataatataactccctttttctgtacaggtatgtttgtatacattattcaactttttagggagggatacattttgtgtgaaaaaattgttaggagattcgtttttcaacgagtctggatataatttttatccaggagtttatgccaatggaacacttgtttatgactcggatgggaatttgatatcagaattaaagtttgaagatacccttttagaaaaatttattcaatattttgaagacaatggtcttaaagataaaacaatgtatttgactaaagacggatttttatcccttgaagaatttttcgatgatggtaaaaaagctatgaatttaaagcagtttgtattaccagaaaaagttacgaagggtgaattaaaacaaaaagatgttgtagcaatagctgtattcaagattggtttaaccaattgcaactttatcgatcaagtatatccgattgaattttccaaacatggttacacccagataacaccttctgaatgtaataaaaaaattggactcgaaaaattattgaaaaaactacaatcaagtgggcaagaatgtgcatttattggagacgactcgaacgatttagaacccatggagttttgttccatatcatttgcagttggagatgcagtagatgaagctaaaaataaggccaagtggttgttagacttaaagcatgatgagtgtgcttttgagaaggtggttgaactcttggtaaattaattgtacattatacacaaaacgcaaaactattgaatttctttaagtttaataacaaaaatacaattcaaaagtaaactgttaaattattaaaataaaaattttaacatcagcctcaaccaccataattttgtagtagcccagttgattctatacagtccattgtatttgtgaactaatttataatttatggattttaatatttaatttttgtagtttaattatccccttaaataagtggtattgagaatatttatgacaatactgagtattgtcatcttcctattaattaatgtttcctctgaccctatatcgaatttctctaaaccagcaactcctccaaaatattttgcaatagatattgatggtacattccatataaaagatgaatcaaaattcaagaaaaacgtcgaagcattcaaacgactcaaacaaaataatataactccctttttctgtacaggtatgtttatatgtttttaattcatattttagcgagggatacattttgtgtgaaaaaactattgggagattccttctctaatgagtctggatataatttttatccaggagtttattccaatggaacacttgtttatgactctgatgggaacttgatatcagaattaaagtttgaagatacccttttagaaaaatttattcaatattttgaagacaatggtcttaaagataaaacaatgtatttgactaaagacggatttttatcccttgaagaatttttcgatgatggtaaaaaaattttggataatctgaagtacgaagcaccaacaaagattacgaagggtgaattaaaacaaaaagatgttgtatcaatagatgtattcaagattggtttaaccaattgcgactttatcaatcaagtatactcgattgaattttcgaaggaaggccacacccagataacaccttctgaatgtaacaaaaaagcaggtcttgcaaaattgctagaaaatctaggctcaaacgaaactgaatgtgcatttattggtgataatttgaacgatatagaagcaatggaatattgttccatttcatttgcagttggagatgcagtagatgaagctaaaaataaggccaagtggttgttagacttaaaccatgatgattgtgcctttgaaaaggcggcaaatcttttggtggattaattgtaaaatattatacacaaaatacaaacgcaatgcagttcattaagtttactaacataatttttacgaaaaggtaaaaagtcaaattactaaaataaaaattttaatataaacctcccaccataatttccttatttatgttgtccatgatgactaatatttttactcacacatttataagatgaaatattaacataatttctaattattatttatatttctcttgtttaaagtagcctctattaagggagtgggctttatccctcaaacggattccagcctagccttcctcaggttactgattgcacatttttgcagtaccgttgttttcaaaaaatatcctataattggatttctcaaaccaatgaactagtaacaacgtatgctaaatgttttggcactcacactgtacatttatactttgaaattcgggcttcccataccaacagatatttattttggtgttgatattgatggtacattttatgtagaagatcctgaaaaatttaagaataacatcgaggcttttaaaaacctgaaatcgaagaatatcgttccctttttctgtacaggtgtgtttatattttttattaatttatattttaggtagggttcgtcttagtgccatgaaggttgtcggtgatgactttcagggtgagactggatacaacggctatcctggtgtttatgccaatggagcactggtttacgactctgatggaaacataataagtcattcacatttttctgaagaatttctcagaaaatttgtaaaatacattatcgacaataatctggatgacatcacaatttttaaaggagccgataagttctttattatcaaagatttaagtccggtttatattgaccgcaagaacgaaacaaccgtgacgaatatagagaaaatcacacccgatgagctttacaacaaaaaaataatcatcataaacaccaacaatattccgaatcccaccgaattaacgactttgtttgttgcaaaggtttcaacaaacgggaaaacattccattttttcccagaagaggtttccaaagaacatggaaccaagaagcttttagagcatctgaacctggatttcaataattgctcatttgttggtaatgggaataatgacaaggaaattatgaaatcatgcaaattttcatatgcagtcgaagacgctgtagatgaagcaaaacaagctgccaagaaggttttaacaaagaaacatgacgacggaggatttatagaggccgttgaatcattatctaatgatatgggaaagccaaaacaaggtatgcctgtggcagaacttggtgaatcatatacctaaatattttctaataatgaatgtttatgttacataattaattcaacttcaaatttattccaagttgattttaaaactacatttgaaatttacgggggatcattccagtctgtttgaatatacatgaatatgcgccctgatgacagtgagcaaagcactaaaaaagatgaaaaatgtataataaaccttggtatttttaaaatcaaatgtttccatccagtactgaaaacaacccttgagagcacagtatgctgtattacacaggcaaaactgccagtttatcgtagaataccaattcgatggacatgaatttaacgaagatacacactccacaaattttcgacttgatacgttgccgtcacttcctaggcaatacctaactgcaagagtgaatggagtgtgcatcaatttagacagagattcatgaaatgatttatcatcctgttcggaaactttatccaacaacaataatgactttttttcaaaacaaggaccatctgacacaagagagttaactatatctatatttccgataaaataaaacaaaataacaaaataaatatatttcattttctatattataaatttaatcaagaattattgaacaaaacacccccatctgataaatcatttaaccttcctgttcaaccttgaccacttggtatcaaatataaccctaaaaattattgaaacttaataattttaaagaaaccttgacacgaaaaatgtagtagggcataaatgataacttctcaaccttccataatgtgtaatgctaactcgcctatatgtgtattacttaggtatatcaaacttgttatttgctactgcctttgattgtttaagcgaacatttgttacactgaggataaaaatgctgttttggtttaacaagttgaatgggaataaggtagtttcttagtaaaaatgatatatatttccctttgagtctcctttttattacacctgatggcggctgatgatctgctatatatctttctgaatccgaaatcaaaccacatgtatggcatccgtattttctacctagaatttgaattatatttctttgtgatttagttgcatagctgtatccatccgcctctaatgataatttcgggatagagaatgctcctggatgcgatagctcacttggtgtgaatgaatgtaacctaattaaagtaaataatactagtatgaactaactttcctccaagaattaagaaagttgccagactataggtagaaattacagtaaattctctcattagtttatttttgacttcctttttcgcttttactgaaatctgcacatcgccattgatttcatcatcttttttgtctcgattcagtatcttgttcttgacatatatgtccaacgaacccattcctagtgggatttggttgtgtaaatactttgagcacttataaaaaataaacaacggcacgtttatacaactaagtttcgtattggagggatttattatacccttcagtttgcttactacggcatttgctctgaaaagcgatagaattatatccagtaaaaactccgataatttatatgatacatagcttccaactgtgacagtcatgactcctgagattcttccagataaaatggaggatgtgtcaattcccaaatcattttgtatcctctgcgacaagttggctaatagtacaaacattccattaagaaacaaagcttgacatagatatgtacctatatttaaatcattatttatcaatataccataccgaatacataagagcatagtttgaagtcgatgtgtaaaatggtattagttatctgtggtaaattggattttcctgatacggattgattggaatccagtatttgattatccatattccgagaatcttgacagtactgactggtatcaagtccggaattcaacaatattttacaacgagatgagaccgaattaagaaaaataataaaaaatattgacaagcataatttcatctgttttgatgaaataaaaataatttaatttaaaacaacattgaatgtgtcggttggatggaatgtgtaaatgtgatgtcggcaatcaagatgaggtgatcataaaattctacatcaaatcgacaaaaacttgttactattttcattttaatgaaaattagtatattctcttaaaatctgctagagttatttcatatataacccactacctggtatcacaataaattgaaatatatagaaatatatttataatttgttgttaatttaacttatattttgtatattatttgttttttaattattcgtattatgaatatagatgcattttcagttgtttttaaaaaaattttaaaaaatatagtgaaaataaattttaatctaacataatggcaactatttatgcctaaaatactttcatatcttatattcattgtcttatcttgtactaattgtctctctgctcccatttcagattttgttaaaccagacacacccccgaagtattttgccatagatattgatggtacattccatataaaagatgaatcaaaattcaagaaaaacgtcgaagcattcaaacgactcaaacaaaagaatacaactccctttttctgtacaggtatttatctttttatcatataacttaattactctattactaaggtatgacattacttatcatctttactctcaattatttaatccaatattgaccacataattaatttaggacgacatctgcaatgtgctaagaaactactgggagaaggcttttttactgagactggatataacggctatcctggtgtatatctaaacggggcattagtttatgatacaaatggaaaagcgttcgtagacaagtttacaccacagttcattgatgagttcgttaattatgtcgaacaaaataatcttaacgataaagtgttttattacagtcctgaaggtaccttttcgttgaaagaattatataaagatggattacaggcaatcgaaaataatttcataacaactccggtagttttaagtctttctgatttaaaatcgaaggatataataggaataacaatattcaaaactggattgggtggttgtatctcaatgagtggtgtacattctatcgaatatacacaacatgacataacgcatataacatctcttaaatgtgacaaaaaaattggactcgaaaagttattaaaagatctaggctcaaacgaaactgaatgtgcttacataggtgatgatgtcaacgatgtcgaagctatggaatactgttcaatgtcgtttgctgtagcagacgcacaggaggaagctaaaaataaggctaagtggactttagacttaaagcatgatgagtgtgcttttgaaaaagtagtaaaattactatgcgatgatgaaggccaacaaaccagctcgatgggatcagtttaggaacaattgtaagcgaatccaacgtataattagcctaaatttatcaatgtttaaattttaaaaattttgttttaacatttgggatataacattttaaatttaaaatttgatatgtggcgtttttggaagttgacgttgattcaatgtagtaactcaaataggcacttggaatgtagtcaaataaattttttattattttttacaaaaacttaattttgttcaaattagtttaataacactggttttgatttatacccccattgcacattttccatttgattgtttgtttcaatattcatcgataaagatgataattaagaccatttggtctttaataatataaactattttatcctaaggataaattatgagatataagttttgctccaaattcttgttcctgttcgttatctttcttgacctgttttgtagcaattctctctgtgctcccatttcagattttgttaaaccagatacacccccgaagttttttgccatagatattgatggtacattctatataaatgatgaaacaaagtttaagagaaacgtcaaagcactaaaactactcaaagataagaatgttacaccctttttctgtacaggtattcgattactttagttatttaacattcatacaatgattaaatgattatttaatgcctggtttatttttcttttcaggcagaagcttcaatgccgtcaaaaaaatcttcggtgcagagtttcagaatgaatcttcatacaaactactcccaggcatatattctaatggctcactaatttacaacagctatgggattttaatacataaatcggttttcaaaagtgattttatcgaaaaattcatacagtttgtaaatgataaaaggtatagaaatcatgtcgtgtttttcggtgttgtagatatattttcactcgaatcttcagtggatcctaaagatgaattaacactagatctagaccctattgttaaatctgacgctcagattaaaaatgaggacatcactggaattcgaattaaaaaaatcgatatcaccgttgcaggttcgtctgaggatacagattatgtaaaatttgatgagggagatgttactgttttatttcctgagaaatcattaaaagatttatcccttaaaaaattagttgaaagcatgggtggtaaaataagtgagtgcacatatatcggcaacgagctaaatgatttaaaagtcatgtcgttccctgatatactgtcgtttgctgttggagatgcaattgacaagattaaggatatagctaagtgggtgttggatttaaaacacgacgagtgtgcctttgagaaagttgtagacctcttgtacggtgaagaaagttaacgtatatttatcggatcacttccattacaaatcgatagaatttgtagtataaaaatgtaaaattaaaatctcatttaaaatttaaaatttaaattttaaagtttaacatttcagtcattacacgttcctccaaatgcagtttttcccactgttgatgtataatatcataaagtgttttataatacatgtataaataaattatatataaattggggtctatattctttcatattttccccgttcccatgaggatctcgccaaacactatatttattggattttattaaacactgattatattttcacatatactgtaaaatttttgtaaaatatttttaaaacaactctaaaatactcatctaaaaaattatatgcaaatatactagtactagtggtcaatagagtggcagatgtgtacacatgcaatttgggactgtgtatgtaataaaaaaaattttgagaaaaaatggagcaaaataattcccctgatgttaaaagatacttaggggtagatattgatggtacattttatgtagaagatcctgaaaaatttaagaataacatcgaggcttttaaaaacctgaaatcgaagaatatcgttccctttttctgtacaggtgtgtttatattttttattaatttatattttaggtagggttcgtcttagtgccatgaaggttgtcggtgatgactttcagggtgagactggatacaacggctatcctggtgtttatgccaatggagcactggtttacgactctgatggaaacataataagtcattcacatttttctgaagaatttctcagaaaatttgtaaaatacattatcgacaataatctggatgacatcacaatttttaaaggagccgataagttctttattatcaaagatttaagggaagagttcaaaagttatcctaaaagcaaaaatatggataatttgattctaattactccagaagaaatagtaaaagagaaagtattgggaatacttctgagtaacaatgccaatctagatgatttgcccagtaaattgtcatgtaaaatgtgcactaacgatagaacctatcagataagctctgaaaatgtaacaaaagcctacggagttgaaagattgctgaattatttgggagtttcacctgaccaatgttcatttattggtgatggagataacgatatagaagtgttaaaatattgtaaactatcttatgcagtgggaaatgcaaacaatgcagtgaaaatggctgcgaaaactgttttaaatgaaagttatgatcagggtgcttttgaaaaggctgtacagcttgtttcttcatcctgatttcataaatcttcctctaaatttcatatatacatatttaaattagcacatggtcagctaatatattcatgaagtatcctaacaattttaatttagaataattaagtataagttaaaatattgtgtaattatcaacaggttaacacaatgtgttagtatcttataacttaatgattttgtgtaacattaataattatattaacaagaaatatatactttactttaattcatgtagaagattttcagagaccagtgaaatcctgtcaaaattattcaaaaatctcaaagataggccaaacataaataatttctccatacatactttaaagtttagtgaaaccgataattgtaaagaaaatagttctataaatgatgttatatccaagaaatcattggattcatcaaaaaaaattcaatgtgcatattcagattcctttttaactcttgatttactaacacattctaatagacggcaggatctctcaatatatagagaaaataaagattttattattagctcttttatcactctgattaatttaaaaactaaaaaccatgatttgctgtcctttctttgtgattctttgacggttattgtaaatgatttgaatttcgacgaattatatagacttgtaaaggttatatctaatgaaaagtcaggcaaatctcaccttagtgataaaatttccactattttttgcagtttactgacaagagttaactatttgatcactgaaaaactatcatacactaaaggaatagttaaggttaatgaactccctaaatattctgctggttatttacatgactcaggttccgatataacacctggaatcaattttgattgcgaagaacatttggaaaagctatggcatctgtggtacatattatctaaaaaatcttttcatgaatcgaagtatacagtttcacttttattgtcacttttggaactcgaaactggcaggatatttaagtttgatttaagaagagtatgtagagcattggatatagttgtaggggactgtaaattcttcagtaaattagaagaaagatttattttaaggctactgaagaggtttagcatagttttatccaatttagataatgaccaggaccctgaacttcacctaaaatccaacaatataactcctattcaagttaagaagtttttctgtaacatatcgaaaatatccaaaatatcacctaaactcttagagaactttttacaattagaaaacagttataaatcatttcaaaattttgtcacattatctagttttcttttgaacaatgaacatggtaaactagatgtttctgaaagaaaccatgaacactctgatagtgatttaactgagtactttaataaaaattcaactgaattaaattataaacacaataagttgtttttgaaggtttttgtagattctgtcgagattgttaagttcctggaccacctgatcttatgtcgtactccagattctgatagctataataatctcaacaactgtgaggaattgagaaataaacttttaaaactatcctatgacttgctaataaagatttcagttgaagctgaagaatatttagttcaggaatgcagaagtatgtactatattctcctcacattttctctttataaaccaacaatacccgatactttgggtgcttctgaactctctgaaaccatctccaataaaattgagcgtaacattactaaattaacatcaaactctagattattaactggtcatacacattctagtgagaataacaatttggggatgaagacagttcaattcatgcttttctgtgataagataaattgttttctaagattattggggtcaaatacagaaacatctaataaggttaatttatcatgtaagaagttggttatggagcttctaaaaaaccatgaaaagttactctcttccaaccaaactcaaggtctgaagactctttacgtcaccttgttgaacaagtatgggttgttgtcacctgagatttattgtgaatttctacatattctggaaccgtggccaacttggaagaggaatgaacttacaatgttatgtgacttattctcaagaacttatcccaactattgtactaatacattaagtagaggtggtactcctgataaccagcactttgtttgctctagagtacttgataggatactgagcttgttagaatctttaattaaatatgtatttgtaaatgataacttctttaaattctctaataaagaactcatatcagttttgaacttcttaaacacttatttggatgcttataacgataaacttacacccagtgattcgttcaatctaacctttaatgagcaagtgaaatccatgataacgaataaattgtctgaaagaatcaatgttatgaacttcaatcagcttgtaaaactgctttcatttcacaatatcatcgaagaaagttttagagatgaaattgttcaggggattctaaacttggactatttgggggatatctcctgcctggtttcattaaatgatcctacggtcacttctaaggttttaaacacctttgacataaaagttgttgatgaaagttacgttttcagagaaaagatgttgaagatgaagtttttaaacaattacaagaaacctcaggtaaatgagaacattgtgagccactctaactacgaggctttaaaaatgttaatttaatattataaaaatggataccaaatattcatattattatattaatttaaaatggtttaatagtgtgcatcaattacatgtcatcttcatcatctatcatatcgtactcgtcgtcaaaatagtctatggaaacggtatccatgtagtaagctagcggtgcgtgccatatctccctccttatgatttctccaacgtcaggcctgttgagccattcatcctcagtaaaccactcaaaaagggaccagtcaatgcacttgtcgttcttcctagccttcaacgcttcttccacggggctctgaaaatgaattaaaatcaataaaataccttcccaggcttccaagttattttggtacactccttaacgttctctttatttaggtcaaatacaacgtgcttggtcaaagaaagtgggctcatgaattccttagccttatcagagaagttctaagaatttattaatttttagtaattggaattcctgataattaacagaaataattatattgttacgagtgttaatttatacgatccattgttgtcaagattatcgaataactgtatgcttttcaggtgttcgagtactggaaggtctgcggaagtcaggtagctaagagcagggtggtgtgtaagagctttgcaccaaaatccaggtatcttgtctattatttcctgaaatttcaattattaattcaaacgaacttggcgtttatcgaaaaatggctgttttttcttgtcgaactttctttgaagattcatctgttcgttggcacactcctcatccagagaaagcagtttcttctgaactaagagatcatatttggtaaactaaataccttcatcaaattctgaaataaacggtaaaagagggttgttcgtggcatcagatctaaaggaaaatttaaagcaacatatcattatagtttaaaataataaaaaatatctgaaaataggaaacaaacgaattagtggcagagtcgttggaagtagcggcatcatcgtgatttctcttcatctctattatcaaaaaatccttaaattattgtggcggcagttagatttaagggatggttgaccaaaaattctcaaaaaacggaagtaagttaagattttacaacggagtttaaaaaattatagtaaaatctagtagatgcttgaagaaaagtggctgggaagaattagaatgggaaaaatagtaaataaatgttgtaatcagaaggtaatttcaaaatcatttccccacagggtggataaataaggaataactaaagtaattgatcaattaataaattaaatcatatataaatttaattaagaataaaggttgtttggtttctatttcagtactatatgttcccccagttgtatagtgatgtcgttaatgtgtaatcaaataaactgtttaatacctaattataaaatatataagtttcattacgttttactccgtttaatttttgattatgatttttattatagaatgtgtaagtcattttacagatcatatgtgaagtagtatatttaaatttaacaaatcatttttaaaggattatttaacttttattcataattttagattgcatgtatacgtatatttcataatgtgttagttacttcctcttgtttactggttattgggcatcaatagtatcattgcacatcatgttggtaattagtaggatttaattatgcattttagatttgtaaaaaacgccgttggtttaattttatactctagtttgtacagctccttttcaaccactttgttttgctctgcggcgaagacttactaccgagataacaaggattccaccaactcctataacgaacaaaagtacaataacaaccaatttagcttatattaaatatgtacatataaaatctaatttttaaattttcagaagtatgttcgatttgggaacattcaacgataacaaatttctttccggtgaattgacactccttaaatcacaactaacctctgatgttacatataagttgatggtgggaagtcagataacaacagggtcctgttggtttgtggcagatgtttatgccggaggcgaatataaattcacaaacaacaactactctgatttaaaaatgatgttaactaccgattataaaacacatcttgtaaaaaatggattagtaaaacataattttaaagtcgaaccgtttaaagaatcaggtatgaaagataattatatgtacaattaataaaataattttagaggacatagtcccgccggtggtgggaatggtcggttaccctgaaagaatgtacacattccttacagtttcaaaggatgttaaaccaggagaatatgtcgtccttttcgcatatggaagatccttctcagacgatcttccacatcgatttaaggagttcagaataaaagttctgtaattttttaaatttataatgcctttattatgtaatatttatttttttatataattaattgaaaaaattaaattaagctctaatttctactatttatggtgaatagctgtgtggattgcaaaaaactgccattactgtaaattatggaaaaatttaaagctcctaatgtattgtataaattttgttatgtataatgcagaatatatccgatgtgttagagttgaccgagaacatacgtaacgtatgctttctcgctcatgtagaccacggaaagaccactttgtcggactctttgatctcaagcgtaggaataataagcgaaaaactatctggaaagctcagatatttggataatagagatgacgagcagaggaggatgataactatcaagtcctcaagcatctcgctcctttactcaaaatatgaacattttaacgacaatagtaatagtagctcgccaaaaaatgataaggtgttgattaatttgatagattccccagggcatgtcgacttttcaatagaagtttcaactgcagcaagactatgtgacggcgccttgctggtagttgacgttgttgaggggatttgcccccaaacgagagcagttctgagacaagcatggcttgaaaacgtaaaaactgtcctaatacttaataaaattgataagttgatactggatttgaatatgactccattggaagcatataagaggatgtgtaatttggtagaacaggcaaacgcattgatttatcagctgtttatggaggaagttatgaaaaaaagtgatacaccagacgtaaccaagagcgaaaaatggttttattcaccttcagaagggaatgtagtgttctgtagcgcaatccataaatggtgtgtatacataccggaattcgtatgccaagtaggccagagattaggaatttctcagtcaaagtatgacgtaatacaaaaatcactttggggagaatactattactgtaacaagacgaagagtgtaaaggtgtgtaagaatcaagagaagcccatgtttgtacagtttgttttggatcagatttggaaggtttacgatgcggtccttaagtgtgatataaattatattgagaaactagccgcacattcgaatgttaaattgacatcgaggcaaataaaaattctggaaacgactaatgagaaacaaactaacaattcgtcattaaagaattttgagttatcgccagatgatcgagatgatttactccagaccattttaagtaactggttgccattgtgttctggaattttcagattaatcgtagattcattgcctgatccaataacagcatctagaaaaagattgaagaagatatgcccatcaataaccaactacgataattatgacaagattattaacctagaacaggatgcaccagtggtactacatatcgcaaaatttttgggatcagatttaagtcatatgaggctgaccagagacgtgcttcacggtgatgaacaagcagacgacttcgtggccttttccagagtctttagtggaaaagtttccaaaggagatgtattgtatatatgtaaatataatgataataaattgaaatcgggtacagtaaactgtgtgaatgaactgggtatgttattaaatattctccttatgagcattattctaaaaatatcttttagatgaggatgatgagagcatgcatatcaaggtttcaataaataaagttatgattctcatgggctctgaacttatcgaagtagataaagcatatccagggaatatagtcgcactctcattatctactaaccagaccaatttaaatacaaatactcaagatcatgtatgaacatttccttcatttatttatataatttttaggttaaagatgtaatggcatggttgctttcattgactgatcctcatagaagaaacctttacacactagaaggaggatataacaggaataaaatatcaagaacaaaaacactctgttcagttgataggcatttaacactgtcaagtgacccacagttcccaccattctcaccaccaacacatgaagtaatttatatacttattttaataatatttagcttaataattctatcataagagtgtcaattgagccgcaaaatgtaaaggatatggatcaaatgttgacagggctagcactgctatacacagcagaccctgcagttgaagtatgtcaattatttcctaaaactgatatttataacacttatttctaattctaaatgttttatgtagattgatatattgaaaactggggagtatatactagcatgttgcggagaaatacatttggagaggtgtatttcagatttgacgaatttgtatgcaaaaatcccaatcaacggtaagatttagcaaactagatattataagtagattggccaaaataatatttgtgtagtttctaagttgagagtctcaatacgcgaaggcattgtggacctgaagaataacattagtttgcaccttttatcaaaaaaagtcaattttcccccatggaagagtgtaagctcagatgacccgttaaagagtcacaacgaagaatcgcagaagaactctcttcaggaagacgaagagggatataaatcagaagataaatcgcatatacaagttattccagagctctggataacacaagattcaataaaccatggcttggtgtattttaaaatatctgaggagttcgttttatttttaacagcaagacaaatgaacaactcaggtatctttattacagttttaagttaattttagttctacaatacttggatgagaatagtaaggacttaaagggactcatttatagcggtgaagtccctcacagatttgaagggtgcacactgaacgactccttgaatctggtacaaactgaaatttacaagctcatgaacacgaatgccaaaccaggcaaaagtggagtaaaaatgagtaaggataagagtgctgaggggggaacagctttgggtgacctttgggggataagcctgaataaaggaacaaggtgtttgttgttttacagaaataatggtcagtactttgcaaataaatcccaaaacctcttaactaaaatgcagtggactttcatagactcgtacaatcgcagtagtatattctcattacagaactcaaagttaatttctaatataatttctggttttgaactagcatcccagtcaggtccattaactgaagaaccactcaggtataatatctacatgtgtatatctataaataggtaaatatagttatatagattgcttggttaacatttgataattaggggagttgtgtttgtgattgaaggcatttacctgaataaagatgaccaactcataggatcgccatcatcctcatcgatttcatacaatcaacttaaaatgcaaagaaataaagattctagggaagataacttaaattctttaaacacagacatgaacaaggactttggtaatattttaaacaagtatacaagctcatacaaagatgagggaagcaagcacaaagatggggaaaataaggataaggatgatatttcaatgaataaatctgacgagcttaacgaagtcgggtcaagtggagcatcgcctgagacatcaattcgcttcagtgactcttgcacaattacttctaaaagatcacaaacgctgacctcctggagagtaactttataaattgagctttaactagctagattttgctaaaatttcattaattattgattcagataatgactaatatgcgtcatctgtgccgcaaagcatacatgcaaagaggaagaacaaggatttacgaagtcatactgagactaggtattttgaaattaattcttttaaacttaattgatagatttgcaatgtgaacaaaacgttctggggaaaatatacaacgttttgcagaagagaagaacacaaatactgagtgagaatgtgaaagaaggcacaacgacatttgtaatcgaggctacaatgccagccagtgagtcctttggactagctcaggacctgagatcaaaggcttcaggcggtgtcattttccaccttcagttctcgcactgggaaatgctaccagatgaccctttcccagaaaccacaatgacggattcagtaactactattcatttatatttatttttataaatattgatttgtatgcaatataaatatatgtttctaatgtatagttatatataatggagtaggaacttgaagatgatggattcaatataacgcttttgttgcaatctaacattccaaggaagataatcaaccacttgaggaaaatcaaagtatgtttagtgggaaaataattcattttaggggttggcgacagaggaaaaggtggttgtggctccagaaaaacaaaggacgctttccactaaaaaataaatataatgtattttaaaatattattccagggcgtccatctgctttaaaagttttagtgaatcggtgaggccagagccttgattagcagacttttttgcctgtttattggagttacggtcagcggtttcagagtcagggttctttcgtttatattttggttttgcttcaggacatttggcctccttttcagtgagtttacagcacttgtagccccagctcttcttatctctgtcatagtaacttccaaaaactgtagtgtggccgttctttaacacatcctcattatattgcgatcttataactaatttcttttcctccttattagtagacttaggagtgggagaagtggaagaggtagcaggaccggttaaaattaaaccagactgattttcagatacgaaattgcgatcaactttatatttattccttttctcctcaagaatcatctccatcctcttaagctcctcctgctccctaatctggcgtttaatctcaagagttttcagctcctcttcacgcttctccttcatctccttctgccgcctctcctcagccttctgcttctcttcagccagccaaaccttctccatgttctgataagtccctaaaaataattttatagcaaaaataatggaaaattatgtataaattatatgttataagttagatgaaaataacgtaaatatgtaggataaaaattacctggatgaaagtgcttgtgccgaatgaaagcggcagatttattgccgattttgcccatccacatctttaaaaactagttttatgataatttgctaaaacgtattaaatcacttcatttttaaatgagtttaaattagttaaatataatacaaataaaaaaacattacaaatattgtaataaaacatacataaaattgttaaaataaaataaatataaaataaataaagtgattttgagagatacaagtacccaatggccataaattgattagatgattaattatggttatttctgttaaatattaaaattttaaattaaattgagtattttcttgattttactgagagatttatgacattttgaaaataatcgcaaatatggaattttttacaattatctattaaaatatcgaaatacaaataattaaacatgtaaattatggacggtgtggatgaggaagttgtagaattattcgcaaccctgtcaaaagctgagccatggaggttacagcgccagtatttcccgagtaaattcggaggattgccagcatggcttgacccagttcatcttccaaaggaatctgagttaaagtgtgagaaatgtcagagtataatgacgttttttctacaaatttatgctccagatgatttgtgtgaggaaaacgactcatttcacaggacggtttatctgtttgtttgccagccttgtggtaatcagtggaaagcttttagatctcagttggctagaaagaacgatttttacgattttcatccatcagaagataacattatgttcccagactctgaaatgggaaaaaggtgctgcttagcttgcggactaccaagcgataatccttcaaaagagcctattcacttgaataattctaaaattcaactggttgatacacaaggtaagtacagttgtttataacatgtgtagatgttagagagttacacgaacgttgtaaaatagcagtgaaacaccagactctttgttgtacatttgatgagtggattcttaatatttgtgaaggcgagattcccttatcagataattatttatcgcacgaaaaggagctttataaccgatatttaaaagagaagaagctaaacggaggtatcaactcatttcaaataactaaattaatttatactattatttaccgtattaattaacttttagagatgatggatgagagtgaggaacaggcatttgaatctatacaggaagaaaacatgtacaacgacgagtcatttctaaaattttcaaaaaagacaactccgaatgaagttttgtattactcgagggaaggagagccactttggataagcgataaaactccaagaccagtcattattaaaagtaatcattcatcagaaggatccatagatggaatgcccaataatcaaacaccaatagaaagtgatttaaatgtagtaaatttatgtgaaaactgtggaagcgacagatcatttgaatttcaagtgttgccccaattactccactacataaagtcggatcgagttgattttgggagcttatcagtttacacatgttcaaaatcatgtaaaataggaaataaataccagagagaagtggtaattttagaaagggactattctttggtcccaaaaccacaaaatgttaaataatatattttttaaactattttaatgtgtatacgttacactccaatttcagttagatatttataaggagaataatttaaagggatgaaaagggcggtgaagtaggcggaagcctacgcttttatatgtgtggttggaatccagtctaacacatcccccacaccggtaataaataggtatattatatgtcgtttattaataattggaaaaattgctatctttaaaattttagaatcagtttccctgagcttcaaatctaaaattttatgtcctgaaaaaccttactaattttattgtgtgcaggaggaatctcacactattttgtattttattgtctattttttaaagatcgccggattctttatagattcctcagtgtcattttaaaatatggactattcacttctgctttttctttgtagcgtcctctttggtatctttaataccgctacacctgcactttgtagtatcccactatcattttcaccagactcacttgaagatgattcacctctgaatgataatttctcatttagaactgaagacttaaaagattcacacacttccaagaaatcaagtgaaataacggaaccagacagttctggagatcctgagcttacccccggtacacttaattcaagatccgagtcccctgaacttacagcatcagtagaaactgtcgtcttagacgaatctccagatgacgactttatttccgagaaagactactcagacgcccttgatagcgaagatgatcaaaccgacagtctgagcaaggatgccgttgatgatgacgaaggccaacatggtcgtttgtttgaaaaattgtcaacagagtactctgatgactttaagaagtcaacagaggaaggaatagatatggactctgagaaaacctacaccgttaggtcagtactcccagttgacagccttctggtccttacaacaccaagcggatgctcccttttggatttcacgggagaagacgatgggttccaagttgtcgagttcaactttaagacttcagaactggaagagtgctcgaagttgactgaggacatcatccgtgagatgaatgaacagttagcaagggatttagtggcccacagaaccacccaagctacaccacagaccaagatggttgagatttctgttcgtgaccctatgaggaacagacaacttaatatcaaggaaacacaggcagtatttaccgcctccgacagactcaactctgagaactcacctgacccaagctcacccagatttggagatgaaagtgacattacagaggaagacagaagggaggcacttttattgctttcccgcactcttgacttcgactactacccaactgactctgactcagtctacgtcatgagcttttcccttaacgaccgtgacactttggactcaaacagagaacagctgttgaatcaattttaccagttgttcaacactccagtggaccagagtgtaaatgaagaagaaagcagtgcaagaacagagaacaaggaatcgacctcaaccgaagataagatgaatttcgagagcattttcaagaacttgtcgagttattcagaggagaagttagagaagttattggacgagatgaaggcatttttggagactgatgagggcaagaaggctgtagagaagttccaaaacgaaatggcttcgaagctaaaggaggtggaaaagttgtacaaagaagagtctgagctaggaaagaagatcttgggtgaccttagcaaacatggagtggaaaacgtacagtgcagcaagttgacaactgaagattgcgcaaactactcaaagtgccaagtgctatcagtagaaggtaaagatgtatgcttcgtatctcccaagaccatttactggcttatgcagaccaaatgcggacttcagtccaaggcagcacttctttccatagcgagagatcttagcaacatcggaatcatcagcaacaaacacgtcaataacctcgaacagtcgtttgacctcaacaaaatctgcaacgccattacacactcctatctctccaaactctctccgggactcatgaacccaaattctcgctccgcaaattcaaataattaattcattcacatagatagtcattcacacagtaatatcgtaatgtataatatatactatatagtatagtgtttggtatttttagttgaattgtgtttagtggattccaagtagataataagtgaatttaattgttaagttcaaaactaataaatttcgttaataaattaaaactttgtaaattcctcttaattattaaaattaatacttttaattaaccagaaaataggtaaaaagaaaaatcaactagtggaatctagtgtcactacaaaattgtaaagaacactcattctgtattattaaatgaagccaataattttaagaggtcatcacagaccattaacgtgtgttaaaacaaacaaacacggtgatttactatttacttgcggaaaggtatttcgtccatactccttcctagccattttaataagttaaaattaaaatccactatgataaatttatttatattaatttttataattaatgttgttaggacgcagttttggcactttggagaacagaaaatggccagcaactaggtaaccttggattccactgattctctttaggtcggtacaactgtggaaggggtgccgtttgggggtgtgacataacgtttaattcgaaactattggtagtggcttcaggagactcgaaagtcctaatttttgatgctgagagagggactcttctgctggaaattttagaagaaggatcttgcaagtgtgttgaaactcactttctaatataaaataaaaaacataataatatttagatatgtcgagtggaacaagaatccagcaggccagaataaattcgtagtgtgccacgacgacttcggagaatctgtcaagatggccactaaggtctatgaagttaaaactcgaaagtctcaagacgggagcctggaacttaattatcgtatcctttgggtccaaagaggataccgtagccgttgcttacagtgccactggggaccacttgacaagactgttgttactggtcacgatgatggtgttattaacgtaccttcttatacaattttattatttacacaaattttctgttttttacctaatattaatgtgttttttaggtctggaacgcttacgatggatcccatttgaagagattggatgcccacaaattatctgtatcatcgatttctttcgacctctacagcctcctgatgttatctgttagtttcccctttaatcgtataattaactttaatttagtgctcgtctgatggaactgctaagttgtgggagactgcaacatggacctgcgttaaggtatgttaaactactgttaattagccttagaattacaagactgatagacctctcaacgcctgtgatatttcacccgtatttaatgttgaggacggcaaaaaggcccatattcttcttggaggaggtcaggaagctgaccaggtcacaactactgccgcctcagagggtaaattccaggctctaatttacaatttaattcacgaagaggagattgggagtgttaaaggccactttggccccatcaacactttgacgtttttgtctgacggttctggctacgttagcggcggagaggatggatttgtcaggatttaccactttgatcgtgactacgttctagataaatatgactagaaccactaaattataatattctactattatgtttgtatatatatatatttttttatattatattttgtatacaacataatgtatactatattgttgtatactatataacgtataccatattgtgtatagaatatcatattacataaacaacatcaagacattaatagtctaataaaagactgctgatcagtattaattagcttcttttctgtgtatctaagcttaacaaggtcaagattacttagcttggttttaccaacatttgcaggaaatttcagaaaagttttcagattcatctaaattacattaattggtactgataagaacctgtaagttcttggtgtttataaagttaaagaactccagagtcttgaagagaagtaggaaatcctggaaataaaaagagtttaggtccctggaaatgttattatagattagataaacagttctgcaacggtgtaaaagagccgtatttggagagagtccaggttccgaattgatatcaggtaacatattttgaagtgaagagtgatatagataatagccagataacagttttagtgacgaaattccatccagattagtagaaatcatctcaccaattttaaataattcattaaataaggcatggtgtctgtatagtaattaggttaatgagaaataaactaacgggtgattgactttaaagtataaataggacaggtttgatacatcctttgggtgcatatgatcaatgaatttgactaaaaagtcaccacaatttctaaaaatagcattaatcattgataataaaagtaaataacgtaaaaataagcttgaaactacctgaataagactttgtggtgtatattacgattgacaaatgattgtagtaatttgattactggcttataattggtagttaagaggttatttaatgaaaaatttgcatagacactccattcagcttcatctccaactctgactcgtgaaagataatttaaaattgagctgaaattcaaaatttcaatctctccacgagccaaactcttcttatcaaccaggctaattatttaatgtgttaatgttaaaaacatacgttgagatcaggtcagcgaattcttcagagtataaattaagaaaacatagcgactcactaaaaatatatcattttctaaattcaacaattatctaattcatttacctaataatgactatgtggtacaaactatttaatgtatttacctaatgactgtatactacataccaaagctttgaaatattattgtaattaatggaatccaggtgtgacggtaggtcaaatatcaacttagtggcaaataattttatgttatcgtcatccttaaataacatactactgtacaacaaacactctaaacatatttattacaccttgaccagaactatacaatacctatatatatatatatatataattgtttacctataattttattgaaatcactaattttataaagatgcggaaggattgaattaaatagtaactggtcccttatatccagttttgacattattatgagtattgttaacaagttgacatcatctagtgcttgaggcatattgttcactgtgtagtttagtagaaacctcaattcctcctttttaaaagattttttaagtattttcttaaaatatttattgaggttttttgcatcaacaagcttactgttgacctttaggatcgtaaattttgagtctaaatctgtacttaagcttctacttttcgaaaattgatataagttattatgcataataaaacgtccaaagcatcccaattgggacttactaacacaatatcccagccgaatcattgttgtttcaaaattgagatggattctttaagagcttctatgaatttgtcaacttcagaactactattatacatggccagggatactcgaattgtgttagtacagtagtacgttttatgcaataagtaagcgcagtgctttcctaaactcatttaatattttaaggtgttagaaatgatataattatatcattgtataataaagtaacgaaatacctgcacgtgttattatattttttgaggcaagtagggcagataagtcaaatgggtcaatatcatcaacgttgaatgatattataggtattctatcaagggtagggtcgaaattatacaaatttaccaaatccttcattctttcatataaatattgcaacagcatattatcatgttttcttatctataaactgttatttattgtgtattttaccctatcaattccaatactgttaataaagtcaactgcagctcctagccctatagcctgagctactggtggagtgcctgcttcaaatctgaagggtggttcaaaatagtcacaagattcaaatgttacgtcctaaaacagtttataaactcatgtattagaataaaaaacacaaaataagtagttcatactttgacagttcctccaccacatttttgtggctctaaatcctccaacaggcgttttttataatataaaaatcccacaccagtaggcccatacatcttatggcttgatcctgccaaaaagtcgacatccatatcttgcacatcaatctaaattattatcagtttaaacaatgatacctttattttcccaactgtttgtgcagagtctgataaaaccaaacatccatacttatgggcaagttttgaaattgttttcatatcttgaatgactcccaaaacgttagatgcgtgaccacaacaaagcaacttaggactcttactctttagtagcgattccaggtgatcaagatcaaactggccattttggtgtaactgaatgggaataattaaaattaaattacctttacatattcaattgaacatccgactctatcacacaaaacccaccacggcagaagattactgttatgctcagataagggtaaaaggatcacatcatcttttttcaagttttgtggtctattaaatatgtaaataaaaagaattagttgtaaactacccccaagtactggagacaaagttaattgagtctgtaactccggaggtgaataatatttgttcagctgacggcgcattaacaaagtctgaaactttctttcgagcattttcatatatctgttaaattaaaaattacaatttgtataaaacaattatcataaataagaatggtgtgtatatgaaatacttgaaatggtacctgagtagaaagctggtcgtgagatgatcctgagcctctataaacactgaaattgttagttgtgtaataatgaaacaatgcctaaaagttcaaattggtttaagttattgataacttacatttaaaacataatttggcttctgagttgttgtagcgttgttaaagtaaattaaatctttaagttcgttatcttctttgttcaaaatagggaattcctctctggctatggcctcaatttcagtcatttgcaaattcaaaagattttgtttgggtaaatcccacgatttatcaaaaatcggtctaataaacaatgtgcttctcttattattataattaagggtgtaggaaactgatgccataatagtaacttttagaataagagtgtaaaaaactttacagaacatctaaaatgcatttgattttagttttatagaaaacatattaattttattccctggcccaaatagatgaaaataaagtaggaatcttatagtgcaatagaaaatgtaaatactaatactattttatttcttaatttaaataaatttaatttctggaatgttattaatttcgatttataatttgaatgcaataattaaaaaatttcattggataagtgtgtaaattcataatgtaatatagaatgttatttaatcatgattaacattccacttttaaggagtttaaatggtaaattttcaaccataactcctaaatacgttcgtaccttttctaacactagtgacttttccgaaattgttatgaacgttttatcgaattataagtcaacgaaggttaaaaaggtttttgtacttgaaaagataactaaatatgatttggaaattcaaaatggtttatcgccagctcaaatttataaaacatttccacgtgagttattttaacttttaatctgatagattatgtacccatttctataattaacattttattagtggcttataacacacatctaactcataaaaagattatggactcattaatttatcatttaaaaaatgtttataaacttgaaaccgaagtagttaaagcacaatcaaaaggacttttaccattcgaaggatcaaagaatactaagagagtcagaccagaccttgtaatcgcagcaggttttcatatatcctagttactcatagtgttatatttaacaaaaacgagttaattagagtattaacaatatgattaggaggcgatggaacgttcttggagggagcttcattgatcccggcagaccagctttatgacacaccaatatggctggcaggacttaacacggaccctgaaaggagcatgggtacgttatgcatgtcgtactttggtccaaaaaacgaacaacattttaactgtggatattacgactatgagaagtgccagccaacgtctaaagagggtttaaattcaccaaaatctgattcacctgacccatttgatagttctagcgtcttttataagaatttgaaagagttttgtagttattcatataacagaatgactgagaagaaactatactttgataatcctagtttgtaccattcagaagacaactctccaattcccattaaaagtgatgatgtactacttacctatgaccagtacgttagagtgttacttgataacttgctgaattttaatttacacccgataccaaggcagagattgaggttaaagctgtttaaaagaaagatgttaaacttcaataagtcaaaacctgatgaaacggatgagagtttaaatagttgttttgacaacagcgtgattgagaagatacttgtaagaaactcaagttcgagttttgaggagaaggagcttatcaactaccacccctcagatacagattcatactcgttgccttacggaatcgttaacgatgttatgatcacaggagaggactttggaaagtccttttactcgatagtacaagtggatgataagcccttaaaaagagtaaaatcttcaggaattctaataacttcggggactgggtctacagcttgggcatacaacatctcaaaaattaattttttcaaggggaccagtttaattaaatgcttacttgagcatccagatgttcctaaatcacttgaaaattccataagtagccaaatacattagttattaagttactctatctctacacactaggttcatactgattctatagatgatgagataattaaggagtctattgagtgttttaaccataagcttaagatggatccaagtaggtcagttatgagatgtttaatcagagaggagatatcaaacaagttagttgaaagtatttttaaataatttaggacaaccgacgaaactaatttctacagctgtaaacaagtaaaggtggttcctctatgtaaaaatgcagttgcatgtgctgacggctcaacaagagttacacttgattacggggatgtggtcctgattaaaacttttgaaagtgacttgatatggtcattaatatgatttatactaaatgtatatacagaagcgtatatgtgtacaaatatataaattattgtattatcatatagtatatccttgtttatagtttgttgaaagaaacaattgtggcagattgaactagtccaagaacctcgtcatcgctatcatatccatcttcttcacgctcagtcttcttagtcttgtcctcctctgaaaggcccagattttcaatcatctccgtaacttcattggtgtttactagatcatctacaatagtgcacataacttggagcttctcaatgccaaaagcgagaggaatcctagtggaagcctcgccccaagtcaaaccttcaatttttaaggagcgaactaacttcaaaacttcgtccaaatcaacatcgacacttgctggctcaacatgaattaccaaggaagatttagcaacctccttcttctttgtttttgcggctttcatagcctccatcttcttctttagtgaatcatcctcttcctcgtcagcctcgcctaaacaaaataaattatggtggaattatttaaataaatatgttttgcgaaatcaatataaacataccaaaaaggtctaagtcatcttcggtctttttatcctctttaacagggaaatttcctttaggaaggtccttgggtggagagtgacaccaagttgaaacgtgtaaataccacctgtaaacatttggataatccttctcagcaggagcctttcctagcttcttgaaaacggcgacatcgtcggtagttgcgttctttacgcctccaacgaaggagtggtaggaaagaaacttatccaagttaaggagaccttcggccttacctaaagaatcaaagtcaactttcaagtcagccatatcaactaataaatgttctcaactaatataatttaaagtaaatgttgtatatttgaagaaaatttttatttaataatggggattcgtaagtactttagtatagatagatgccattaacactagttatactttattataaatttaaaaaataattcttaattacgaatgatgtaatttttggtatagtataagataatttaatacgtttaaatcaaaaatggattcttcgagttaaatgtgtaaaaaaataattttcaacctttttgctttaactaattttatttagataattatagttattttgcattattatccagaccacatatttaccaaacctcatataactaccatattatgttgtttatttaacaatttatttattctgatttttgggtttaaaattaattaatgtaacataatttaacattttcattaagcatagttgtttatacctaatttgtaaattattaatacatgtaaactgatcgttaatgggtatgttattaatattttgtaatatttaacttgtaaaatttgttgatatttttttgcccataaatataaataaaaataatatttaattacttgattaagatggttaaaagaaatcttgattccaaaaacaccatacacatggcctcaaatgattcagtacagagccctgaatcatccaagctcaaccatgtttcaaaaatccggaaattgtctaataatacaagtattcaaaagttgtatacgagtccaaaagttacaacaaataataaaacaccagaattattaaacaaacgtgctaaaatggatgtttccatctccagaaaatcgacatcagacaccgaaagtaacatgagctttgaaccctttagtaaaaacacaaattttgctttcgaaaatgatatattaaaggatttaattgaattgagtaacccatctaatacatcaaatcaacgcaacggagtggatcaaacttcacaactagaacacaacccaatcacagattcccagataatcaggataatagacaataataatgaatacgatacccaaaaattggctgaaaatgataactattcacaaataactagaccagttgataacgaagcccctaaagagcaatacgaaagttactttgccaaccctgaacttgaatcaattattaattcacaaatttttgaagacaactttagggaaaagctgacaccttcaagaaaagcaaactatgtacacacactcctttcaggaagaacaagccttgatgactctattaatattttaaataaattaagtcaaagtgaagttaatacacaactttccccagttaactccccaattaattctcaaaattcagtagaggataaccacgacaaatattacgaagttgagtctatcaatgaaggattagataacgattatacacacattgatactaccttgttagatactaccaccacagttactactaatgaaattgatcaaaatgatgaaaccacagatgataatgttactccctacagagaaatagtcagtgataactcagaagttggaaaagaagttgaaagtgtagagagcgtaaaatttgaggaggcaagagatgaagaatattctgaggtggatagcggtttggtggagttcaaggatgaatttgatatggaggaactaatttcaaggtataaaacgctgtataataacagtttttttaactgtagtaagactggaacagggaaattgagagtagtagtgagatgtagaccaagtacctgtaagaacaaggctatagaatgcgaaaaatcatgtgtaaagctatttaagcctggaaataagaatagtgtactaaagtctcaaaggcctggagtatttgaattcaacttcgaccacattgtccaggaagacgattcaacagaaacactttacacaaatagttgtctagatctgattgaaaagctcttttcaggaatcagtgttacgatcttcgcatatgggagtacagggtcaggaaaaacgtacacaattgcaggaacagaaggtagtgtaggtttgttgcaactgattattactgatttgttcaactctagccaagtaagtgaacaggacctgtatctgtcatactttgaagtgtataatgagaatgtgtatgacctactccaggaaaatgaggtgaatttgcaattacaagaaaacgatagcaaagtgtttgtgaagggattaacaaaggttaagatttctaactacgaagattttaaacgtcttttcgaaatcggtgataagaatcgcaaggttttttcaacaaacgcaaacagatcctcaagtcgttctcacgcaatacttcagatacaaacttctttaaacaccaagttgaccatcattgatctggcaggatcagagaggatgaaaataacagataatgctggcgatagactgaaggagtcatcatatattaatcagtcacttttagcacttataaactgcataaatacattagcaaagaagtcaagcagcatgagtggatctggtggaactggggaaagagtcaagtacagagatagtaagctgacacacctgctgaaaaactcactaacaaataactgttttatactcatgatagcacatgttaacccggaaaataagttctaccaggattcctataacaccattaagtatgcactgagggcaaaagacgttgaaatctcacatgttataacaaattctgttagtcaagctttaaaaatagttatacagtttgtaaataagtagaatattatgacgtaatggtatgtgtaaattatattaatgtgtagaaaagtggtaaggaagtcataaagaagttttctagagaattgttgtttttgatcaatttgatgaaaagtaacattagtgagaacaaattggaattgataaggaaacacatttcacaaacccatctagtagggcgaccgttgctcgttgatcttcttagttaacactccacacatttaatataaaccctcaattaatatagtaaatttttaaaattaatggccgtgtaaatatataattgacatggtttataatgtctagtttacattatatcggtcagctctctctggaatcctttaaccgacaggttattgaaggtttgattcttaaaattaatttaatttctgtagcaacaattgacaagtgctctaaaacacacaatccaagagtattagaggcaataaaacaggtaacacattttatcagaattttataatatcttattttaacgcacttagtttcattcctctgttcgattcattaattgttagacttggattgaaaatttaaacaaaaggcttaattcggtaaaatatcaatcgaaaaaacgtcattctaaactatcgaaatcggtaataaaattattatttcaattttcaattaaattatttataatgatggttaatatatatataataggttagagaagttttagaagagaataaggaatcagagtatgttttacatatttttatgtaattaaataataggaagcctgaaacatctgaagatgagtttttggatgcggatgtcgttttagcaaaacaatcttctccctcagtgtcaccaattttgagaccaacaaatccagtctcaacagagtcgccaaaaaataataaagattcatcaaacttagaaaaagctggtgataattccgaaaaggataacccggatacggatattagtatctctgacattagtgatttggacgacgaggaacctgagactgatgacttggttataggaatgttagataaggtaatgcagtacttaataatttatgtgtatacaattaatactcacatttgtaattaatgtaatttaggttaccagaccaagtagtaagaagtttggacctcctttatggaaacttaagttaaaatatggaattatgcaggcgtgtttattacatattattaaaccagtaatttataacacatatctaggattccattaacaaattgtttagattaataatgtcgagattccatttgacacacttgagggtgaattcgagttttaagttattttatctcatttttaatgatttaattttttaataatttgattgcattttttaatatcatttttttttacaccaatgtgtggcctgagagattctatgtgttagtttgttttttgttcatcagtattttatgaataaatgttatgaattgattgtattcatgtagacatatctgtattgtataataggattattttaaattttagggaaatggccaaggttcctaatcccagagtgttttttgacatatcaatagcaggaaggagagctggaagaatggtatttgaggtataactttctaatttagatctttttaatttaaattctactaataataacaattcattagcttttcatggataagttgccttacacagcggaaaactttagatgtttatgcacgggttagtgatatattaaaattttgattatattatcataatatgtttattcatctaatctgtatataggggagactggactaggatattatctaaggccaaggtggtataagaacacacctattcatcgcattgttactggatttgtaagattattaggctaattatacaatttaacagatgtgtcaaggaggaaattttaataccggaaactcttatggtggagagtcgatttacggacaatatatgcgtgacgagtcatatacatacctgcactcaaaaagaggtaattttaatcaattaactgtccataggtgttttgggaatgtgtaaaacaagatttaaaaactcaaattcatctcaattttatatcacatttaaaccttgctcctttctagatgataaaatggtactggaaatattcaattgccttattttataggtggtatttgggcacttggaatatggagaagatgtattggatatgatcgagaaacaaggaacaatgattggcaaaacgaagaagaatgttagtatatacaactggtataataaataatagtaatagttgtcattagcggagaaataccacttgaaactatatatgatccaaggataaaaaatgaagtaaaagaagcaaaatacatcgcaagaaccgtaagcgtcttgcgtagacttaatactgatttaggatatagaaaggcctatatttaatgagaaaatgtataacttagaacaatcatacaagaccataataccagacgaagtttacaaaagagcccattttaacttttaatcaactaaaatcttattttatatgttacattttaatttaatttactaataaactctaaaaactatagatgtgtagttagataataaacactatcgggtgactttaatgaatatttgattaacatttgttgtaatccatatacctgagattctaaaaaatgaaggataaatgggaccctagagtatctgctccaataagtagaacacctcatccagtagttcacgattgcaaatattacggaaaatgtatgttgggagggattctatcctgtggacttactcataccttcgttacccctttagatgtcacaaaatgtaaaatgcagacaaatccacaagtttataagtccttattctcgggcttgagcgttataatgaagcaggaaggccttagcgggctagttaaaggatggaagccaacacttttaggctactccatgcagggattgggaaagtttggactttatgagttctttaaagacttttacggaggccagttaggagaagaaagagcttacaagtacaagggagcaatgtggttggcagcctctgcttctgcagaggttttcgcagatgtgttgctgtgccctatggaaatggttaaagtcaaagtgcaaacagctccgcttacagaacaatggccaacacagcttatgaaagcaacctgtaagatgaattcattgagagctgaaactaagtttcctgtatctcataattatattaattaatgatttatctaatctaattgattttagtttggaagtttgagaccactcttgagcagacaagtaccttatacgatggcgaaattttactttttcgaaaaagtcgtccaacttttctatgatcatgttttcactaaacctaaaaacgaatactccaaagaggttcaacttggaattacatttgcttccggtaacttattatttcatatatcaattccttaggttacttggctggtataatatgtgctgttgtatctcatccagcggattcattggtttcacaaatgggtaaatcggaaaataaaggcaaaagttttggtcaaatggcaagagaagttggtgcatttaacttgtttacaaagggattgggcaccagagtacttatgattggtactcttacaggattacagtggtggatctacgacacattcaaagtattatttacacattacaatattcagttcacatattatcttcaaaccatatagtttaatggttttaactactgattacactattcaccaatatatttactgttttaacttgttattgtagacttccatgggaatgggaacgagtgggggaggatcagtcaaaaaaacataagattccattaattttgtttttagttttgttatatatgtatttacataaattcgttctatttgattcttcattttattgttgataagatcgttttgaaaccatggattctgaccctccagtcattgataggccagtggcctcaagtggaaggaaaaccctggcaatagtagtaatagggtaatttctaatctatttatattgatattttatgtttggactaaattaattataacatttttcattttataactaatttatgtagaatggctggaagtggaaaaacatgttacgttagaaaactagtagatgtgctgaaaagtaacagaaagaaggtttacgtgatcaatttggacccagcagtatgtattagatttaaaacaatatcaatttacggttcaaattaatattttttcaggttacaaagattcactacaaggctaacataggtactgattcaactaataaattatgtttagatatcagggactccataaactacagacaaatcatgaaaaaatatcatttgggacctaatggagcgataatgacatcattaaacatattcgtaacaaggtagtttaacgccacattatgggagtttagatttgataaaatccttgaactgttggacaaacgctcagaagtagttgattacataatattggacactcctggacaaatagaagtgttcaattggtcagcaagtggaacaattatattaggtagttccttaatcaattaatctgttttagagtcgttgtcttcatcatttcctaccatggtcaattatttaattgataccactcgctcacagaatccaatcaccttcatgactaatatgatctactcctgcaggtaagtatattttcaaatcaactgatttttagtgtgatgtacaagtgccagcttccctttgtagcctcatttaacaaaataggtagttcatagttttggttgaatttatgattttttagacgtcaataggcacgaagtatgcctagaatggatgagtgactatgaaaaattctacgaagcagtaacacatgatgaaacatacatggcgaggtaaccttattaccattataacacctgtaaccttaataaatcaacattaattaattattcagcttaagcagatcctgtgctctaatgctcaatgaattctatatgaacattaaggtgagagactatttataatatagtattgctatttaatggttatttgtaaaaaatttttcatttagtgttgtggtataagttgtatgactggtgaaggttttgaggaccatgttaagttattagatgaatgtgtagaggaatacaacaggtaaaccaattaaatattcaattaaaacaaaaaatatgttatttattaacttaatttagtgtatatttaccttggttggaagagaagagagaacaagtgaagaaacaacttaaggaaaaataatattattgtaatataaatttatatgcttgttgatcctatatatacttaagtgatttataattataaaaatgattttgaactgttattaagattttgtaagaagtggtgtgtggttaagaataacatcacttgaaatgactagagggaatcataaacggaatagaaatgaacctagatcaaaatttagaaaactttggaaggaaagggaacaattattaagcaagaatgtaccatcggaagatggagaaaacaacattgattcctctatcttgaaagattccgcaaatattactgacttaaaccaaaatctagaagtaaaaagggttcacgttcctaaaactaaatatgttatctcatttgggtaaaattttaatacttaaatagactaaatttagtataaaatattccacaaatacaataatctcatttaaacttgactaaaattttaacttatttatactcacacgaatacattgttcaattcaacaaaaatttaggtatgttggaaccgcataccacggatatcaaaaacaagtggagtataaaacaggtgaaatggataaggttaaaactgttgaaggaacactcgaaaactgtttgtttagaatcggagccattaatgaggcctttagaaacatgacacataagttacaaatgtctaaatgctctagaactgacaagggagttcatgctgcttgcacataccttggaggtcgtttcaatatcgatgttgaggatttatcagatgatgttgtatctcaagctaagaaccatccttctgaatcaaatggtgaactaagcaataatcttgagtcaacgaaagatcaaaaattatcaaatgaagataagtttgtactgagactaaactcagtattaccagaagacatacgctgtttcaaaatccaaagagttacaaagggatttgatgcaaggtaattttaaccatactaataaaaatttaccaattttaaaaatttatatatgtaggacattgtgttcgaaaagaaagtatgaatacattattccggaatggatactttctaaaaaatttgtagtaccaaatgaagaccatgaaaacctttttagaaatttagaactgttttttgaagaaaatttaaaaactagagatacaattaaattaagtaaattaaacgaatctctttatgaagtaaagggtgagtatgaaaaaactgaaatagatcataagcgactcgaagaaatattaaatttttatcaaggaactcacagctttcataactttaccgttaagcaaaaggaagatatcaacaacagttctaggtttatacataaaatctatatcaagtccgacaaattacaagaactagatgtggttaagattctaattgttggacagtcgtttctatataaccaaattaggaagatgatatctttggctctacaggtttacttaaagattgcacccaaaaattcacttgaattctccttaaacaaatcccacattctaaacattaacctggtcccttcagaaggattaatactccatcatgtatttttcttacttattttaagtatttcattaattatctgatcataatgtaatatgatggtttagccttactttgatcattacaacactaatcgctgtaatccacctgaagttccttatattgaatataaggatgttaaacccaaagtggaagagtttaagagagaacatatataccctgaagttaaaagatcaatagattctgatttgtaagttaataacattttttgattcattcttctattgttacacatctttctttccacacattcgatacaaataaaacatattgaccctaatacatttttaaaaatatttttaatctatttttaggtgggaaggatggcttgaaactattcttaagtacccattctatttggaaaacaatttactacccaatggggaatctgtatagtattttaggatataaaccatcttaaattaattgtaatatatttgttgtcatttttaaatacataataattatataactttaattccaggacttgaaacatgtcagatgataagaacgaacgccttcttggagggccaccttatctttcccatcttttaaccaacccagacaatccagttgtttttatggacatttcattaggatcgcaatatttaggaagactcaaaatagagcttttcgcagataaggttcccaaaacctgcgaaaactttaggaagttttgcacaggtgaacataaacagaacatggttccggttggatataaaggaacaaaattctcaaaagttattaaagactatatggttcaggtgccgatgattatatatatatatatattaatgatttatttaatttacatagatttaatatatttacagggtggagattttgcaaaaggtgatggaaccggatgtatttctatatacggatcatgttttgacgatgaaaatttctctgtaaaacatgataagctaggaattatcagcatgagcaacacaggtcctaacactaatggatgccaattcttttttataacaaaggagtgtgattggctggatggaaagaatgtggcttttggaagtctagtggatgacgaatcgaaactagttttgcaaaagatgcaaaacgtatctgtgggtgaaaactatgcccctaaattaaatttgttggtaactgaatgcggtcaactgtaatattttaataatttacatgtaaatgatatattttacaatattagttacaaactaaaattggttcgcgttaagccactgcttagccttttccaatagtgctccgcccttattgatggcgttaactaaattttccctaagctcattcaaattctgaagagcctgttcctctatggttggaacgtagtgaagatttggaggcctgggtttcccaaagtactcatcagaactaaaagcctgagtaccaggactaaaacgggtgggtgagaagccttgaggcatcttgccgccgaagaaagcgtccgatgaaattgaagatttcccttcaaattgtgataaatcaggaggatttggcatgttaagaccttgtaaaagttcattatttaaaaatggaggtggaagacttccatctgctgtgttattgacacctactgtaagaggtgcggattgtaatggattttgggtagcacccggaaatgccgaaggtgatgggatactagatgaaagaggaggtgatttggaaaaaggaaatggacttgttaagtctggaatgggagatttaggagcagaataagaacttgaagagtcatctccatggagcgacgtacttggaaatgtagattcaagattattttccttttcaaaggtttcgaagtcgaaatcgtccgcccttgttgagaacttgttctttgcggacctcttttgcctggaaactccctcactagttccgaagttattatttggaactcggttgaaagcacttgtggatggtactggctttgagaagtccatattcaagaaaggatcactagcactcatggtatcctgaatattaccactagacaaaaaatctgagaaattatcaaggttgaaattagcatgatcaaatgtcgatgggtcaaatttgttaaaatcaaacttatcattggtattagattgttcaggggccttagtggcggtagaagtactagggtcaaaagaaggtgtctctaagctaatcaaatcactgaaatcatcaatttttgtggtggcaaacttttcagcatcgtctctgagtgagctctgaaaacttaactcgttcattgccttctccagctcagcaaatgtgaattgctctgattgaagaaaattctccatttgatcgggatctacatttggggatacatcttcttttgcaggagattcatcttctggttctttttcacctttaaccttagcaacttcgtcatctagagtgtatgagtacgacaaaaccttcctattgtcataattagtaggtttatctttcaaattttgagagataagatattcattaaatttcttgtttcctcctacatgtaaccttactagctgatccctcatgaatctatccatatctacagaccgaacaaaagatatatgtgagcccagttgcctgtgccttccagagcagtttaggcacaaataaatcgcaaacgacagtgataaccattttgggtttgaaaatccgcattcaaaacacgtagtattttctggtattctgaactgtcttctgaaaaattcctctctgtcggcttctgagacgaatcctctctgatctaccttcagactaagaatccaatccatttaattaatatacagtgaaatataatataaaaatgaaacaaatttataaattggattcaataatccaattaattttctgttagagtggtgcacggaccctgattaatttgaccggtgagtacatgaaatctaattatatataatatataaatttcttaacaaaattattttcactgtgtaaaccacgggtgtatgagtgcctcgagagcagagttaaatactgatctttttcctagggcgataatgcagaagtcgaacattttgggagacaatgtccagaggtttgacttgaatgaataactttcatccgactgtttcccttctatgaagttaaacaacaaatttcctactagccacaaatcgtgtttgatgtcagtcttgccctctaatggcttaacatcgtctaagtctacaaatttcggttgtatatcttcattgattccgttttccaacccgttagatgacgtgttgcacaatatcactgatttcattgacagtttgtttaaaaccagtgactttgaatgtaaataaaacataaagttaagcagaccctttattatattccttaaaattttaaaatctatcaagctcgggagtgtattaatgtgataatcgtccaggttcatgtggttgcaggtatttaataatatatagtataatacgtcctgattctgacaactctgattatcacttattgaattgaaatccccgttagtcaataattggataacttcgacaaagtttgggtgtgggttgtcaaagagcattttataaatattaaacgtatttaggctattagtgagcttaagcaggaagtagtttcccgtactgtgatctaggacttcatactcctgcctcgaggtacacttaattattcgggtcagaccatatgttgacaccctcttattacttaagctctttaccactgtcacaatgtcatctttttcctccttgttctttacaaacccgttcataaattcacggttgataaagttcaagtttactggtttaaaaactgcgtactgtaccacgtcatttttcaagtttaggatgttttccagtgattttgagtttgagtctgaggagcctgaaagtgaagaatttgagtccagtgaagatcctcttgatttagtgaatttatttttgttatgttctatgcagaacttcctgaatctatatatcaagcttccccaattattcttcctcaaaatgctgaaagactgtagtccgtccaagcttctaaacctactaaggttcattttagggtttgtttcaaggttatctgtgactgtattgttggaattgtttgaatcattaggaattaaatcgtaatcgtctgcatacacgcagggccaggaaaaacggcggtttattctgatattatcgtcattaacctgttgtagcaaaagatcagaatctattaaattgttgaattcggagtcgtaatgtccgattgttaaatctagatcatggttgagtgagttatgatcatgcaagttataatctgacagaaatgtcagagaatctgataaaatggttgaatcttgtccttctgctactatcccatcctttgagatatctgagcgattggaaggaagtaaatcttctacggctgttttgtatggtacccctgtcatttaaaatttaaatcttattcgaatcaaataaaatttaacctttgtaaaaagcgctaaaaatataaacaattgaataagttataaattatttgcttcagaaaaccgtcagaaataacaaactttaaaaagtaccatgcacaggcttgacgaagaatacagccattaaatataaaatgctaagattcctaaaacagtatttaaatggataaaaaatctttaaggaattagatgatttactaaagaaacgaccagtattaaatcaatttatgaatataaatgtattggtcaaccttccactaaatctaaaggctgttgatataagaatatgacaataagttaaattatacagcaagcatagttaaaacaaagaaacggaacaatcccaaaaaggtatttgttttatagattatatgatgtcgggcatgactgaacaaatacaaatgaatgagaatccttcagtctaagattgcatgatctcttctataccaaaccctaatcctaattaattcataaatacactgacaactttttctctacaaaattttttgcagtaacattattttcactagactttacacagttatattctttcacatctcgtttaccactcaagtctttttttatatttacgaagaaactaaacatttaaatttaaattttagttactattaattttaacccatacctaacatttattaaatctatacacatcctgcacatcaaattaaatttttttagaattaacacatatgagttatttatacatttaaacatgttttattatcttatataaatttattttacatgtgtcatgctgttttgttagattctttcccttagtaacctggattccttttcctcgacaaatttttgaatccccaattggcccttatattttttgaatccatgaccttctacatataaacttccatttgattttattagctgtactattgatcctccaacagaatataacccgtgtcgaattctctcccacttcagggttgaattgtgagagttgtgccacttctccaactccttctctactggatcagggtacttggcaacaaactcatatgtaggttttccagaagtgatttttacccttttatgagaattatcagccttttcctttactgattttgccttatctaagtactcatccaacttgtttttccttgcatttattcttgaatcacctagtgatctaaagttatatctactttcctttaaaggagaatcatcttcaatttcttcttgaccttcgctattaggatcattctctaaatttgataaataatttcttgtcactataggatccaaggattcattattatcttcacattgttgaaattccatggaatctttggttttccttttgattatcttgtcctcaacatttagattattcttgggtgtatgtgaacaataatcaggaatcggcctgtaataagtgtagttttcaagagggtacatatttccatgattaccaacgttgcctattaagggcgaataattttcaactatacaaggatatttaacatttaaatgtggtctttgatagtttgggctattcaaaatagggatgttgcgacatgcctcaaagcctaattattatatcattttaactaatatgtgattacctcggttgggatgagacacattgttgacaaagttcacattaacaattgaagaacctaacaagtaattggaatcatgtttaacagcatgtaagctgcttggtctaaagttttgttgtataaaattcttgtttaattccaacaaatccggcgtttttatgggatgtaaactggcagttctctttctattgttaataaaaaccctatcttgaggtaaataataggccattctgaaaaataaataaattatagaatggatcaatatataattgtaaaataaattattgtgatgttaaatcattaatattaatgcgtacgatgttccacgtgaattcaaaatgacacaaataattcatgtgaacatgaaaataatgagttttttataatgtataatacatatcgagaaggaagcctagtgttatttatctatgtatttttaataatatttatgaattttcattaaaaagcgatgaaattttagtcgtaattttttaaaattaataagtttattgatgtaaaaataatggtgagtatcaaagcagaattataatgaaagaagtaataaaaataatgaagtaaataaataaataaaattttaaaatgtttgatataaatgcttctaaaaaaataaaacgaaattgaaatgtgtaccgaatctttgtcataaattaagtatatggtgtaaataattgtgactggctcatattattagaatttttaaaatttcttgtttttgaaagaaattaaaattaacctatggttatttttaaattttatcttttcaaaggttttagttgatgatttatataaatgtgtgaatatgaatcgtttgtactatatcaacttcatcaacttaattctgaggtgatttttacgtggttttggatttttatttgagcttttgagtttttaatttgatgtgtaatatcctatatataaaattttaaagaattgtactaaatgtatacttatcattgagttaatgattttgatttttaatttctaaataaaatttgtaaattaatatttattgtaataaaatggcaatgagacctagtagtccaattggtgctaccagattagtcaataaacagaagggggagcattttaggaaacaagagtcaaaggtacagaaccttgattatctttcaggaaatacggtatgggtaaaggtagatacagatgagctgtttgttgaatgtacagtcaaatcagtagaaggagaacagctgaaggtgaattgtaaaggggaagagatactagtaaagattactgattgccttaacagtttgccggattttgaatcattacaagttaatgatttgtcgaaaattccacacgcaaatagcgcagtggtattgaagattttgagagaacgctttgacaaagatgtgatatatgtaactttataattagatacgctactgtattgatagttaacaaacacaaatccgtttagacctacgcagggaaactattagtggcattgaatccatttaaaaaaatcccaaacttgtacgaaaataatgtaattgagctctacaaaaaagcagatacaaccctaggattcccaactgatttggacccacatacatacgcagttggccagtgtgcaataaatggcctcttcaacgataataaaaatcagtcatgcatagtcagcggagagtctggagcagggaagaccgaaacggcaaagcaattgatgaattttttcgcctattccaaaacgaacttaaatacaggtatgaaaatatatagatagttccgttatttataaaatgataattttcttttaggcacctcggtacaggatgttattcttggtagtaacgcacttttggagtccttcggaaatgcgaagactattaataataacaacagtagcagatttggaaagttcctaaagttaaatttgctacccacaggaggaatagtagggggagagatgagcagttacatgcttgagatatccagagttgaattccagaacgaaaatgaaagaaactttcatttgttctaccaggttctaaaggggcttaaaaaagaggaactagaagcatactcatttatggacgttaaggattataactatctgaaccagagtaactgttatgaagcaccaggaatagatgacgtgtcagacttctataacgtcctgatccagcttaaaaagttattcacaccagacagacttaataactttttcgagataatctcaggtattctactttgtgggaacgtggatttcgttgaagagtccagaatgggagtggactcagcagccaaggtatcaaatgtttctctctttaagaagttgacagaattgttgggcttggattatgatttagccgagaaggcgatgattgaaaaggttatcaagatacaagataacatgatagagtcgccagtaacatcaaaagtagcacaagttaacgtgagagcactttctaaagatttatacggctttctattccagtatataatacagttaataaatcagttcacctctgggaagtcagatgattcaaatacacatgaaaaggactcatatgtgggaattttggatatttacggtttcgaatactttaaatataacacatacgagcaacttttaattaactttgctaacgagaagctacaaaagtacttcataaacaatgtgtttaccagtgagctgtctttgtatgagagagaaaaaatagacgtaacgtcaatagtctacagtgataactctgtagttctggaaatattcgagaaaaaaaattgtggaatattcccttttctatatgagcaatgttcaatggagtcaggaacatcagatgcatttacaaggagctgtaacaccagaataaaaaacgaaaattttataccccctaagggaaacgtaaatgaattcacaatagtacacacagcctgtaaagtagtttataatactgatgagttcataacaaaaaataagcattctttatccgaagttgtagtaagtttattgttaaacagcaccaacgaattattgagagatatggttatacattccatggcagtggaggcaagtatggaatgtagcccaaccaatcaagcttcagccagaactagcagaacaactagatcaagtacaaagttatttgttggaaacaagtttctgaagagtataaatgaactcattaaatgcttggaagaaaccaactctcactttattagatgtgttaaaaccaatcaagtaaagcagcctggagtctttgatgtaaagggggtttatggacaattgaattctcttagtatattggaagcagttcagataatacataaaggctatgcatacaagtcatcctttgcaaatttcattaaggataatcaatttgtatataacatactcataggtggaaaatctgatggtgatgactctacaagtgaggatccagaaaaggagaaggaaaatgcagtaaacatgttaaaattgctggatataccagaggaagagtatcaagtaggtttaaccatgatattcttgaagaaaaacggatggatactgctggaaaagtcgcacttgaagttctcacaactcctggctccactctccaaattgcttaacgcatactaccagtcttacgtcaacaggaaatcgtacctaaagaaactgcaaatgtttaagagagtacaagctttagcaaggaaattctctttaatgagtgagaagtacaaaaaattgaaagtagtgaatcaattcgtcgggtttgtagtggttgcaaactggcttaactacgagcagaaagttgttaattcagccctggttattcaatcaagctatagaatgctggtccagaagaggaaatacttgagggaaatagaacaactccgtatgcttcacaagaaaagagttataaggagaagattaggcaaatttaagtcctatgtgtggtattccgtatttggtttgtatctacagagggtgtataggataaaccaagttaacaaggctgcgacaagaatccaagcaacatggaggatgcatcgttgtgtgtcatattacaaccatctccgttacaattacttaaaggattacgcagcaacagtagttcaaaagaacgtgaggtgtttccttcaagttaaaaactatgaatttatgagagatgctattccaagcgtagtattgatacaggtacttttatacttaatgttttaataacattaaaaattactaacattgatttaataatttaatatttaaaatttgaaacataattctttagagctacttcagaggatggttggtcaggaagtttgttgactccaaggttaatgtcctaaaatccatcagaaatagactggctttatattctaagctgtactttatccagaacacaataaagtcaatattatcaacacaacagttcaagttgttgaagcaagatttatcaactttgcaggggtaattatattagatagccgtttattttagattctcacaaaatttataaaatttgtataattgataccaattttaggttcttttggactcgttgctggtatgttgaaatgttgagaataatgtgggcaacgaaaacgattaaaagatattggaagagttacaagttcagaaaattggttaacagccaaaaggatgagttgatgcaagacatatacaagaaagaagttcaacaagtcacgagaaatgaaattgtaaactcattgtccctgttacaggtaactgatagtcaaatgtatatttatcaattctacataactttgaattcataagttaaataacgttcagaaatataaatatggtttattgcccttgcatgttaacgtatcgacaaaactggatgagttttacccaaatgggtggagtaatagtttgggtatggtgatgagagttaatgaagataagcaaataactaacgcctcaatgggcatgtttcacacagttctagttttaaacggaacatatgtttacacatatggactaaacgactataatcaacttgggtatacaaacagaaatgaattaacaggaaatgttacattcagagatgtaagtgttgataagagtatcagactagaacccatggtgatgattaaggagggtttgaaggtaaaggatgtagcatgtggatttgaacacacagtgatgttgttaaatgacggtagcgtgtattcctggggtttaaatcgcaatggacagtgtgcacagattcaaacatacgaggttataacaacgcctacactagtagcatttccgaatgattgtaagctctaattctagtaaatatttagaaaattattgtatatctgattgtttatttacaaaattttaggcccagttaggcttgtaagctctggaaactatcatgtgtgctgcttaaaccatgacgatgagttgttcgtctggggaaaggcgttccacctgggactcaactgttcagacctattcaggccaatgaagttggaaactaaattaaatttgaaatcagtatatgccggtaaacaagtttcttatcttctagatcaggaatctaacctatatagttttggaacaacttataatggacaactcggttactcgtcgaatagctcagacaaatcatttgaacttaacaggaggaataatgagcttggaaatctagcttattgcggagaaactagcggttcaacaatctttaggtttgttctcaaccaggtggtcgatgttagtgtgggaaataacttcacggcggcagtagatgtgtacgggaatttgtggcaatggggaacctttttggtggtaaactcaggaacggaaacatttgaacagaaaacagagtataaaccattcctagtaaaggtggataagaagattctaaagtcgccactggcaaaagtatcagtaggatggtgggaagtcaatcttctaactgagtcgttatcactttacggatataactatttaagattagagaagaagccaggtgtagaaaacagtccaaaactaaaggcgactgtagaggaaaattttacggtatactctccaattctcttcagttacccaggattggcaggaatggtaccaaaagacgttaaaacgttagcatcaccaaccataacagtaactatggtaagaacagactagattaaacttaattctaagaaaaaattccaaaaagttgcaaattcgggataatgtactctgaagatacagaaaaagtacatttgtggtggaaacaattaatgtgtactaaaaaccccctagagattactataatatactttaaatattttttttgtgtaatattattgttcttaaatactgttattgtatatttctgtgaagggtggcctctgtgtaaaatattcaatttgcatatcatgaaatttataaaattttaatgggaaaatttaaaaatcctacaaaaacacataaaatggatgaggttagtgaatcctcactccagcagaaaagtgattcatcactggtgagaagaatgagcgcctcatcagtccagccgaaagtagaatcatccgatccaaataaaaatgatctcatagaaacatatagaagtgtgtcggaaattccgaagaagaaaagaaagtcaaaatttagagatttgttctgcttctctttcaaaaatccagcataccaacgaatgccaaagaataacagaagatggctccatatatacaagataatgtccatcatggcaatgattttgttagtcgttgcttacacattctttatattactgttgtttgctcccattatatatgtggatgcaggagcgatagttgacccgaatttattcaaaccaactcatgaaagtttgttacattccgtgagaactttgtggtaccagaaggcatatatagtcatctttgtggttgttacattctcaattacactaccatttgtaaaaatgctggcaacactcattgcatacttggttacatcattgcatagaagcaggcaaattgatcttttctacggttcgaaactaagagtagaatcacaagtaagagcattttcctctcgatcacaatcagatgagccaaattcatacgaatcatccaattttgagtcaatggattattcagtgtacgaagataggaaaataacaaagtacgcaagagaagttctcgtaattttaaaactcatctctaaatttcaaatggtagatagtattatcttgttgtataatatttgtttcctaagatcagcctttacatggtcgagacatggaaacggtttgttgtacttagtcatttattgtttgacctcaatattgggaacgcagttgttaaacttatcagtggaaggagaacatgatatgttcgaatactggaaagctgttaggctattgtgcctacctaactcagtaaactatgatagatactacgatacttttcaaaataatgatcaaagtgaagaattggaatacaaaaattctctaatggaatataatgtacaatataggacaagtaatacgaattttaatgaaaccacacacctagaaagtagcagcgaaatggatcaatctaactccggactgaatatcacagaaaagtctacaagttcagcaggaaagaacccgtctgtatttaaccttaagtctaaagaaaaatcaggtagttttgaagttattagcaacggaactagtgaaccttatttctacgagtttctatacaaggataagaggaaggatcttaagacgaaatggtatatatcagaaatttttgtagctgtgttggttgttttgaacattgttgcagctggattaataatatccaacgaaaaactatttggaattacatttactccagatttcgagaaacagttcggagtggacgggactcagatgacattttttgagatggtttggtcacttagggactgttggaattatcttccattcttcattttctatgtactttctattttagtaccggttttatttcatctctcgtttcttgcaggactctttctatacaaaattactgttagcaataaggattttagctctatatccaaattcgacccaggcaatccattgatacacccatgccattcatttaacttgtcagtaaaactgacgaaatttgtactaaatatttcaaatttgttgtcagaatggtcgctgggagaagtactagccctggggacagtggcaggatatgtatcactttatacggcaccaaacgtccgcttctatataccccctccgaaattcgtctccgtcttcttcataatatcgtccttcggagtcacctcatttttaattaacatacagttcttcatgtggtacaccaggattataaaccgtctctcggatgtaacaatttatgtggaatcagttaattcagcaaccacctcagaaaatggcgattacagtattagcggtaaacttagtcatacacacctggttaatgaccagggaatgataataggtgactctaaaagtaacctacaaagactggaatcatctattgaacacaatgttaatgatgtagacaaccaaaatacgaggactccaggtaagaggaacaaggttcggatcatgttcattaaggtcgttgactttataagacatgtaatatactctaaaataattgtttctgccttcttcgcattcctgttcctcttgtcattgtgtttgttcggattcggtttcttatccagtactcccccaactaaaatcgacgaacgcaaggtacagaacttcctcgactttggcttgcctggaatcttcaacattgttaagagaaatctaccgaaatcatatggagactgtaattacatagaagagcctccaaaaccatgttcaggatcttcatcaatatatcacatgaatgaaactgtttatttcgagttagtatggattacgggtatagattcaattcaatttgtagagtcgaactttgtggttagggatgataacaggttatcaatcacttctcatgtaaaattcaccgtccttaagccatacatgaagataggagcatgtctttacggcaggtgtaacacagtatatgccggcgaaaacctctgttgtggagatgatgtccacgtcgttatatcggtttcagcctcctgtaatgacgatttcccgcatctgaggaatgttaaatttgatgaattgaaaatcagaaacctgaaattcagaaacgaactccaattcctaattcataaggtcatttcaatagaggcattcctggagaaacagttgctgaggtacataaataattacttagaaaggcaagaggaattgtttgactggagaggaatcccattctctgtttccgattacataaactttttaacaaatgttaacttccctcatggaatcaaatgcccacctgtcaaacctacgaaaccttctcttcctgaaaattgatagtacactcccttgtaaaatattttaaactaatgatgttttatatccacttgattaagtcgaaaattcattttgtttaaaacttggccacgatcttatcatttctctctgtaatatagtcgaatatatcttatatgattattatattacacgaatattaactgatatttatttgttatttattagaaaaagttgatttgtagaaagaaggcgattttctatgaattcaaagacaaatattgtaaatcggggtgaattgactaccttctaagggaaataataaataaaaattagacaacagatacgagaaagatgaaaaaataaatattttcatgaattcgtaaattaatgaagatgtgtaaacattaaggtatatagacaggttcgacaactgtgcaaccagtgcgcagacaaaaccgagcaaaaatgaaagagaaaccaaaaactatgtaaactagttaaaaactataaataaatgcacaaaaattttaattttataaatgaaaaataaaaaaataatgcatagtctgctgtgagtttaatccaatgctgctaaccaggtttctgtttggaattttggcaattatagtttcaaatataatatacaaaccctgtcaatcaataaaagatgaatttactataaaccaggtaaaataaataaataaaaagtggttgcgttaacaccatttgattcatacatagaaaataaacaattcttttctttattatgattttaggttaaatcatcttttatccagagaacagatgtggatccaaatactccagcttcaggtataaattttattttttagaatgcattcgaataaatagatagttggcattgaacctacacattagaaatgtgtatatttagcttgtttaatagcacccctttctataaaataatcctacttagtcaaaactggagagactgtggatgtgatcactaataagaatgatggtggtgggtcggataaaacaaaacaagagcctagtaaagctgagaccaaggtagaatcaaccacaaccaaagagcaagttcatgaacatgaacaagaaaaacaaaaatcagaaccttcccaaaaaactgaggaagttacaaaacaagttgaaaaggttgagaatccaacaaaagagagttcagaccaatctaaaactgtaaactcagaagttaatcatcatgaccataaaactcatcattctcatggccatcatcacaggcatggacatggacataatcatgatgaagatgatttcgatgatcatgatgactttgatgatgaagaccatgaacatgaccatgaacatgaagatgaagagttgcatcatgccaaaggtggtaatggttcttcagttactgaacacaaaaaggatttaaattcaggacaatctgaaaactcagaaaaggaggtaaaacagccagaagaacctaaagatagtcaaaaggttgagaacgccccaaaggttgaaggtgaacaaaaagttgaaagtcagcagaaggctgaggaaaccaaacctaccaatgaaccacaaaagagtgaagaaaccaatcagactagtgagccacaaaagagtgaagaaaccaatcagactagtgaaccacaaaaggagaaagaagtcgtgacagaacaacaaaataaggaagaacagcctgttaaagacgattctaagaaggaagaaacaccttctcctgaacaaactggtggtgaagaacaaaaatcgcccgtggataatcaggccaaggagactgaagccgacaaggctgaaactggggttgaaaacaaagaagctgaacaaaattcaaatgctgtaccggaacaacaaacgcaggtacaaactgaaaaatctgatagtgaaagctcgagtgaccaaacccaaccgccaaatgtagaaaatagccctggtgaatcgagtgaaagtcaagacaccactcagcctagttgtacctgcgacaaagaggtaaatcctcataaacaggaagtgaataatcaggaaagtaaaccagagaatactgaacaggctgaaaatacccaagagaaaactaaagatgagactagtccaaaagaaaatcctaaacccaattcagaggctatggaactttacaaaacggacttgggtaaattgagtgaagaagataaccatagtgttcaagaattctacaaaaaaaatcaggctaattgttcaattgattgctcacaatcatgtaaaacacagtttcaaggtccgactcagtgctttactcagagcggaacggaagtaacttgttctgcttttgcagatgctactagtttaacgtgcccacttggggccaacccctgttccacccctatagtaacttcattaaattcattcacagtaaaaaatggaaatgaagaagttggaaccctcgaggtaaaaggagccaatttcaacaattgtactggattagctcttgctccagtcgatggtaagtgtggtaaagagcaactattccacaatcttttgttcacttcaaaacatctaaatgtcgattttaatactgaagtgggacctgataaagtcgtgttctctaatcttaaaatcaaaaatggagaatacaaggtttgtcttttccaaagacatgatgaaaatgggtcgcccggtatgtttgcatcgttactaagaaggattttaacatatgctgatccaacacacaactcaggaaacgattcaaaaactctgttctcaatagatgtgggaagtttgaaggtatcggattaattttaaactaattgtaatgttttacccatttctttcacgcccgtattcctttaagtttgaaaactagaataaatataatactcttctaaagatatgttaaaataatttttataagattataattaaaatttttatatcaaattattataattaaaaaagatataaaatttaaattttaaaaatatactaatgtgagatgttgcaacccaatcaatgggattctattatatatcatcagtctatgattagttttaattcacgtttgtataatatattattcttcttttatccttattttgtaccatatttaataacgttatcttactttagtctgttatgtatattatgttgttttaaatcatgattatttgaaacttttaagcatattttttaaatatgggaaacattaaatctaaatctccaagaaataattgtgaatttgaagtttttgagcaggaaataattccaactgataaccaatatattataaatgaggtaaatttgacatctatttacaataatattttaatttttagaattttgaccctcccgaccatataaaacccgtagataattttgttatttcgaaattagcccacaaaaaaactattttcctactcaaaaatgttactgtcaaagcattccctgtaagcttcaatttataattcataattttccagaatgtaaataaattttcactttgttttgaatatgacaccgctgaaccttgtactgtgatttttaaattcggccaaaaacacatgggattggataatggcgtacctcggtatgttattttttaattttataatattataatttatcataatttttagtttttccaaaccaaatcgcactagtaaaactttcaatttggaagttggaaatgacaagaaatttgaactagaatattcgtacgtactccaactacgtaatgttactttggactctgcatctttcactacggagcggaaatttgtaccgattttgatcgtaattagctctttaacgaacgactttacgtactttgcaatgtgtggtctaaagaaggacatatacgagaactggaacatttatgtaaccaagagaagaattaaggttggatcatgtggatatttggtacaagaagtctatggattaaacgagtctgaatatggaatcaaaaaggaccaaaaggatgagcgaataaaaaattgtgctatttgtctagaaacgccttcaaatactattttacttccttgcagccacatttgtctctgttccgagtgctctaaaacagtttcaatccagtttggagcatgtcctatgtgcagaactgtcgtgagccagattttacacattaacgatcatagatgattttaaaataaacccttaaaatactaattcaagtatatttatataagtattatatatatagtacgtagtgaattttataaaaacagattatatactcaagttagatatgacagatagacctcctgatgcgtctccaagcaagacaagctgctgagatggaacaggacaaatacatgaaacaggggctccggagtttatttctccatcgaacttgtagataaacttgtagagtaaaataaattcaattgtgttgatgagcagctcatccaaaccatcattatggtttccattttctttagaaatgttattgttggagttagtattgtacaaaatctgttttacaagcagagacccgtccatcagccctatatatagaatactgccattagagttgttagaaacatgcactgaggagatcggagtagtagtgttggttagccttgtggcactgatggtgctgagaaagttccctgaaaacgtaaatatgtcaaccttcacgttcccataaacgaccaaaacaatttgctcacatgtgcagtactcgaaattgtttactccatatacgttgtcatcaatcactatgttattgttcgtatccaacaagttgtttgaggaataaaacttcctaagcttaaagctactggagtatattgcaaacgacgaatttccgtagccgacccagaggtctcctgtggtgggacagtagcccagacatgtaataaaagctacttcgtcagtctgagattgggaatcttggtgattatttgtattcagcactttatgtctcctaatttttgagagctcaagatcgtctatcagaatagagtcgggctcgctttcatcagtgcaggaactggtcaagctcacactcgaagtgagtgtatttgaagagtatgaactgcagtacacattcgcgtttgtcatatttgaggggtatataagtttgattagttgcattttaggtatttggtacagtagcaggtgacctaagtggttacctatggctagaattgtgctataattctcaaatgttgtgatgaatgccagtgaattcacttcaaataatgtagagtctatagccttatcaatatcaaaatcagtttcagaatcaagtgagttttctctcgataagtatctgtcatacaccgtcctcgtatcaagaactatcagctcgtcgagtgtgaaaaatgaatatataattattttcccacactgggtaccgcatgctaaaactcttcccattcctggcacgttgccagatacggtcttcgtaacggaatatgggaaaaggctctttctttgtgtcatcatgttcgtgtagtagtaggtattcaccactgaatcttccatattcacgctgttgctgtaatatttaatgtaatttgggttcaaatagtagtttgacacaacctgaaatgggtgcaggtatctttctagggaatctggagtctgtagaactatgcacttctggtccttactgctctcagtcctctgatagctcttacttgatttcattgagtcacaaaaaactcccaaagtcgggccctttcttcctggttttcctggtatttcatagtatgtccagcatggccccttatctttcttcttcgtagatgaagatgtgtaagatgaggtgctcgtcacaacaacatccttagatgaggggctggtttctgatttcgttgaactcttacttttcgatgatttacttgacttaccgatagacgatttgtggaacagtgactcgaatgtttttgatgtagatttaaactttttgtgatgtttagacttagattccgtacgagttagttgcggttctgggacttctggttcaggaacaggttctgagactgtttccgataattgtttcgagatttgtcctgataactgttcttgtaactgttctgataattgttcataaactggctcagaaacgggttcagataattgttccgaagtgtcctggtcatatgaatctctctcttcaaattcctctggtgggttacttttgttgtattcagaatattcatatggctcagataggagctctggagttttgagttctgaaactgtttctgataaatcttcttgtaactgttccgattgatgttctgagaattgatcagtaacaggttcagaagcaggctctgataattgttctgaaaattgatttgaatcatcttcagattttggttctggtgattttgattcgtcgggatcagtttcccgtttattagtttcgtctacaatctttccagtagcatcatccgatttttgttctggttcattttcattagaatctggaagggattcggaaccgccaaatgaaaaatccggactttgtgtaaatatttctttgggggtgatttctggagtttgaaattcttcaacttcatctacacatgcatttgtctgctgagattcttgtaaatccaactcttcttcaaggtttttatcttcattgttgtgaattttatgaaatgaagaagaattatctgtttctaaatttttattctcttctaattccttattttcggaagaataaagttcatttatattgcgattgtgttcatgagtcttatcttcatctgaatgggtgtttgtttctggaaaattgtggtttatttggaaatcctttaattcttcattagtacaatctgaactttcatggttaagattgacttcagattcctcaggtgtttcatttgacattttctatttatattccattaataataaaataggggaataattattcatcctggaaaaaatagttatgaagctaatgtgttaataaaaccacactatgataacctgcagtatatttatttatcaaaaatgtatatttaatttgttgttttttatttatatttaatatgtattataatcgatatttaaaaaactttatttattggaaggtgccagctgttttaaacaagctataataaatctgaaattcgcttttattaccatttatcaacctgctatctcagaaagaatccttaaattctttagcatttcacttgcataatttataaacattccgaatccgttggaatggttactccttctcattctgactcctcggttaaagctaggagaaagtttgtttaacaccaatttataaaaattatcatattatttaccacataatgaagataattaataattcgtaataaataattgctttagaagtagatttgatgaccctaatcccgtaaaaagaacaggattttcggattctaaacactcttccaccaatgttaaacccaattataatttacagaatgttccaaagcctaataataatttaaataatttacaacaaaatgtaaatttccaaactacggtcttccaacctcaactggttccaccctttgttccaccgcctgtttttcaacctatccctcaattccaaattcccactcagaatcctggttttcctgttcccacggcccagttatcgcattttaacccaccaattagtcccagtttaaatggattgaataataagttggatttcgatacctgcaatgtaggtgtcatggccagtattttaattgaacaccgggataaaataagtgattttgtgccatataaaccattcgatgacttggataagatacctaacaagcaggatagtgaagcagttggaagtttgaccctcactcagagaaataaagtggaggatttttacgatgaattggaagaaatatttgaacagtacagagctgaaatcgacccgaatgatgctagtcttaactattccagaagaaggaactttaattttaccaaacagaccaatcaacctctaaagatattaacacaagatgatgtaataaacccagcaaagagggaatattatgcgtctggagtctacgggagtaagggcagagagaacccaggattgggctcaggtgatgatttgttcgaaacctttaggagaaaacgctctactaaatatcatgaaaactacgcaattaggtactttgaattaatacatttatatactcagggaggccgtgagaaaagatcccaactgtatcgtaataacaccgggagaaatttatccatgtatcatgtaaatacaatattatttaaattatatagtttatttaaacctttaaaatataatacaatctccttttttagagaattggtccagggattttagaaatgaatttaattaattaataaatcaacaaaatataaacttgaccctaccctaatttcatttaaaatttttttattctttaaactattctcaattctttgggaattattgtttgtaccacacatgttatctagaacattttttactttcaggtgtaaatcactagtgttcttaatttcgattgagtttgtggatgaagtaaattcagacccggcgttgtgttctgggctttcaaaatcagagtgtaaacaattagaacccgggtttatggccaagactctattaattttagccaatttatccagggataagttagatattaaggttttgttgtaattataaaataggaaaattgactgaataaggttattcacggatttcatggaaacagtggatgaaataccgtctctaaagtttgaaatttcaaggactttatccagactaattgatagtagatgtagtaattctagttgattctgattacaaatagtactatttattaataaaggttgggacatatacgtcattgagatcttgtggaatagtaacagggtaacatctaggtcatttatataatttaggatcttgtaatttctggtaaacttagaaaaaatcttcctgctgaagttgagaaagtcatcgtatctaaacaagtcacacttgttaattatgcccacagcacacactagtcctgaataatttgagcaattaacccttatttcagataagattgacttgaagaagtataaatcatttaaaaataaccctgaattcccgagaacagtgataaaactaattagtgtgtggttcaaaacgcggtcaagtttattaatatcagaaatattgctttgaggaaattggtttagagtaggttctgtgcgattgtgttggtattgaatattttcagattttgaaaaattgcgattgcataagggaaggttgttatttgaaaaaatatccctcctcaaagtgattgactcctccaaaacccttgatccattccttaaaaaatcaattaaaatttgattcttaggatagttcgagtcaaaacaatcgattctagaaatctttttacaagtatccttcagtagttcaagctgatttatcgaaaatgataataagttccgacgagcaatgaggcttgatacggacacaccaagttgatcgacaacgttggataggtttaatagagtcattgaattttatcatatccaaaatttatattacaaataaaaatattcttacattttatatttcagaaattttacggaaaacgcatatccatgggtggagacgaattaagttgcgcctttagaccagcatcgatcattacacccttcaccatatcgaaaggaaattattaaattttagaatttaaaatttttattataaattattgggaacattatcctaattcaaaacaacatttaatatgtagtgtttaataaaatcatttcaaatatttaatgtagttttatttttaattctgtaaaaaatctctaaatatagttttttattttctctacttcgaaatcttaatagtttctaccaataaactagtttttatcacggcttatcagttcattgaatttaattgagattctttttaaatagtccaggaataagaaaggaagtaattcttaaatagtctcctggtatctaaaaaaataaaatcatcaagccaaatataaatagatttcttatcaacaatgtttcaacacaagtttggagccagggctctcatgagagagggcggaaagtttttgggagccgcagataacccaactctacgtaacatagaagcaatacagcaaatctctgacatgttgaagacgtcgttgggacctaatagcatgaagaaactcattgtgaaccatatcgacaaaaaattcgtaacgtcggattgcaacaccattttagctgaattggaagtagtacacccagtgggcaagatagtcttaagttcagtagagtcacaaaagctccagtttggcgatggaacaaataccctggtggctcttttgggagatctcttaacaaacgcaggcgaattgctacaagacggagtacacatttcagatatcagaaaagggtacgaaatagcattcaacaaactgatggaacatctaccaagtaagtataattatcttcattatatatatatatatataataatggaggaatacataatcatttaggtttggtttgttataatatcaaggatttgagggaccatgaaagtttgagaggagtactgtatagcgcaatgaactcaaagttcagctatatgtcggaattcttgagcaaactagttacggacgcagtgatatcagtgatgccagcagacgtatcaacgttcgatcctcaaaatgtcagagtagttaagcttacaggaggctcactcatggaatccaatgtagtcaatgggctcgtgctaattagagaacctttagggtcagtaaagaaggcatacaactgcagagttctagtgctatcagtaggtttggagtttgcaggacctgaaacgaaaggaaccgtattgttgaaaacagctgagcagctgttgaacttcaccaagggagaagagaaggaaatggaaacagtaatcaagtcaataagtgacaagggagtgggagttattgtatgtaacggagcagtctcagaaatggcactccacttctgcaacaaatacaatattcttgtgctgaaattaatctctaaatttgatctaaggagagtgtgtagaaccacaaggtcacaagctgtgatgaacctttcacaactcttaccgcagaaaactgatgtccaaaatggagcaaccgctgatgtaaatgaggaacttggatatgtggagagtgtggaactaactgaaattagcagtaagaagtgcgttataatgaaggctaaggactccagagtcaacactattgtactaaagggagcaacaaacaaccaattagacgaagtagaaagaggaatcgatgacgcagttgcattagtggataatttaaaagttgatggtaaatttttaccgggagccggggcagtagaattacaactatctgtactacttaagaagttcagcacctcagtatcaggtttggaaagatacgcagttgaagccttcgcaaaatctctacaagttgttcctaaaatattagcaactaacgcaggagttgattgcgaaacactcctaacaaaccttctaagcctccatgagaatggaaagaacaattcatgtgtagatgttgaaacaggaagctgcggggattccatggaattgaaggtttttgatcactatcagacgaaacataatttattaacactgtgttacgaagcactgatgactatactaacagtggaccagatcatagtagcaaaaccagcaggaggcccaaaaccgccaagtcaaaataacccagatttctaaacaatcagtaaaagcgctgtattttaatatgatataatatattttagatctatatttgtagtgtttattagtatatagaaacaaaaaatagatccaacaccataaaatcgtagattttagtcaataatttttaatttttcgaataatttttaagaatctttattttacaaaacgttttaatttatggttcaatcagctggaacagtacattttgatcaatcagaacctttagtgttttattacgagtcatttaaacataattactcagaaactaaaactaataataaaaacaacctaagtaaaaaaaacttcaatactggaagcttcactgtgccagaacatctaccagttttccgtcagttcttcaattttaatagtggaaaaggtaacaaacaaaaaaagtatacccgcaaggattccatagatccaagtaatagacaggatccagatgagacgttatcctcgatttataataccaacaacactgatagccctcttcttttcagcgatagtggcagtgatcctgtcaatgatcacgattccgatttaaataatggagtaacagaaaaaaatgattcatcacaagaaacaaatgggacggagccagtatcagaagaaaaggtgtccaacgctacgtatttttataagattctgtttcacctgattgacattgcatccgatggaagccgtttcaagtgttgcaaaagatcaccagttaacccgtgtgaaccatgtaagttcgtggagaaactaatatacacatattttgatctcacgacactggaggatgtaattgcagacagatctgacaaaggaatctgcggatatatatactgttgtaaccagatcgagaaaaggtaactttatctactttaataataatttagttccggaagctcgaagtataaaatcgatgtggtatcaaagagcgtatatgatagggaggaatgtgactcattttgctcaacaacgtgcctgaatgaaaaccagaaggtcagcgccaaggtatcactgtccccggtggaacttggaacattcactccaagagcaatgagaaatgcaaataatgacactctgaagaaactgtacgaagacgttttcagcctcaggaactgttttggctcatctataaattttaaccttaataatgtaacaggcggtacgacagatgtagggattcaggacgttagttcacaagacactcctattaaacgcacgggaagtagtgaaaaggtggtgaatagaagtacagatttaataagcaggaagacaacggaaattgaggataggccgtcaaagaactcactagaggagaaaagacaaaggattgacacatttgaaatatttgaagacttcgactcgtcagatgaaatgtcagactcctcaatgtcagaagcaaatgtcaaattttacaaagacccagaaaaactcgtttcaatttataaaccatctcctcacaatacagatttggcagacaacacgaccactttctactcattcgatcgcgaaagcctggatttgtcagaacccgaagattatttagaggatgattatttgggcattttctcatggttgtggtacgttctgagtaatttcattacaagtaacactcgtgattttcttaactcaggaatagtaactcaaaatacctataacgtaagtgatgattattttttattaacttgagtaataaataaattaggaaagtttcgatgatttgtatgaccagtgtctgaaaggaataccaaagagccttgatacattaaagttacacatacactacttattgtcaacatttaaaccagtcaaggtattttttatatattatttatattttatttattaaattatctaatttaatttatagaataatctactcaacactaaaatcatggaacccctggcgtttacgattaagtatgtgattctaaagaataggaaccatctgcctctgaattacgactcaaatttatcaaataactggcatgattccaatacacaggatctagactcagagttagacgatattgtgtttgaagaaccagaagaaacggataatttagtctatggtgaagaagcactagatgtagattatgaaatgctattagaagatgtaaacagtgtattaaataaccgattccagctggaccaagagtcaatagatatactatctgagcttttcctggacaattgaaacattttaatccacacccaattagttaattttaacttgtttatcttagttttgtatatatgctatcatattaaacgttggcgtatttttcctccaaacccttgaaaaaacgaccagcgcactgaggaccataagtcgaaggaggtttacattgcctactgagtaaaacgtttattttccttaaaaactcgttagactccgtaattaatttgtccctttcaatccgggataatttaccttttatggtctcaaattgtttgcaataagaagtagagttagttagaatatcgttgtatacagcggggtccataatgtatcgtagctcagaatacaaatcaccctcatatgaattataaaccctcaaaaacttctcaattaaattaactacatcagtcaaatcactctccacaatatcgttccagatatctatttataattattaataaaattattagttttatgttatagaatatatatatatgtatatgtgtatagtcattgtagtatactgtgtatatggtaagtaccctctagtatcttgtatatcatgtaggcaaaattggaaaatccactaacaatataggttttaaacgtcattattctaaaaacaaagttaatagaggaatatataggtaaaataaatcaaacttcttgtaggtcattagtggaaactgtgtagtgtcgtagaatacactgtcgagttcattcattaaaacacattctctgaacttgagcatatcctcaaggttctttagatactgattcacatgcggataaaactaaattatcattattatataagtaatgggaaaagaaaactaattatgaaataacattgtcagtgatgagtgtaagaatgtagtcgaagaacttttttctagaaggtatgggcaggtcaaattcctgaataatgtaattcttatccacacctcttgttgaattgaatttgagagacaaaacgtttggtttcccacccggaatcagtaactccaagctctgagcaaagtcacggttaattctgcaaatttcatcaatcagtgcggtgcagctatcaggagttccattgttcccaagttgaattagactgtattctgagtagctagtgattgaaataggggatttagtgccaatcaaagggtataaaatggtgcctgaacatttaggagtaaagaaaccataataacaagcgttcttttggaggctattcacgcacatcaaacagcttttgttataacaaataagactatttaagatatctggcttcagaactatgcaaacaacattctccctaggtttatctatgcagaactcattaaacagagtgttcgtgttgagtgaaacatctttatcaagtatgtaaaaagtaggattatgtgaagaaaatgagtatttaagtataataaatgatataaaagtgaataaaaaatacggaatcatgttaacatataataataaataaatgtgtaagaagaatgagagaagaaaattgaaataagtggaaatcagaaaattctaatagagaagaattaaaaaaggattgtttgaagtgatataatgtccataaagtaaaagttaaaaaattaaaatgagtagtgatggaataacaacactaaattaacgggttaagataacaaataatacattttgtttcaaacttggaatctttctatggatattattttaatcgatatttaaacatataatgtaaaatatgaatccagttgacacctcttcagttgaagatgatctcgtccaaaactgtgaaaaaaagttagttctcagaagattcaaaagaccgcttttaactctaaataaaaaaataaatgatatttatttaacaagagatgttcctctctgtgtatattatagaaggtgtgttaaactactaaggtggcatcttcctctaatttctaagattttcacatctgaatttttgcaaaataatggcaacaattttagtgtaactgaattactaagtaagaatgatgttttagtgagttttctatgtttattttgaatttttaggtcccaactgatacaaatggtcagctgtattccactagtgaccaaaatactttacagaaactcttagaaaatcctatgataaggatatttggtactggattctgtgtaaagaaggcattttacctcctacaagacctttactgtcacattgccactatgtataaagcatcttttacaagatttttatataaatctggagtattagagtactgtgatagctgtaaaaatgaaatcaattctggtttgagattatcggattaccaattaacaaagctttttgactgtgaagcatgtatgctactcaataaaccaacgtttgaggagctttttaaatctgtatttgaagtcgttatatcaacggattccatctgttgctcagacgacctttgggtactaggtacacttttatacaactatattcatctaagattactgtgatacctaaactactctagattgagggaatttcactaataattctttagattctggttcaaatgaccccaaattatcggtactttcttccttataattcatttttaggttgaaccaactaataggtacatttcatcggtgtcaattacgttaaagccccgtgattttaatctttaattttttcaaaaacttgggaaatcttaaaattaacttcaataaatgtaaattaaaactcatatttatgttagtaaattaaaaacgtttttaaatcgttcaagtatttgagcgaaaactttattgtcatgtacctataagtgtggtattacggtgtcacattaccttgatatcgagagccatcagaagaataagatcatctgaaaagctgtttaaaagtgttttaaaaacctgtgggagagtatttgtcgattctgtccttctctctcaaacagtcacaaaggaccttgatgccatttctggagtaaacctggtaatattccttggtcctggataactttagttaaaattaaagaatacctgtctcctagcaagactcttgttgaataaatgtccaaatgtgacaaatctgcagacgagcataactaaatagtaaacgtaagaagtgaatgtgtacccaggttccaacgtttccagagtatgttaaaaacagttgccatgaattagaaaacttaagcgctgttaacgtgtattctgtgtcctcatctgagtgataataattagtttgtaggtttaaaatactgtttaagtctgtaacagtgaatttttcagtgtgaaccagaggtaaagagttgtctgacgaatttgaattttcattggattccaagttattttgagtgacatttaatttttctatgcgatcggttacggattccattaaaaatttagttaaaaatagaatttcagttaagttgtatcacaagaatactgtacagtggagtttaacacaaaagtgctaaaattaactcaatttaatgttaaatttaaaatataattttataaatatttttaatttatattaagcacataataacttaatatttaagataaacacctttaatgaaaagtagtgtgactgaaaataacaaagtgacaaaaaagtgttaaaccaatgaaatctatgaaacaaaaccgtgcaaaaatattaacaatataaaataatataaaattagaataataaaatattaaaggttagttggttgtcattttcctagataacatttcagactctacaagagtaaattcgggtatccaaccatagcgatttggatttgagttgactctaacgtatatccaattgccggatctggcaaccagctgaactttttcagactttttaacggatgtggtattttccgagtcggagctccaagaagtatatactttcatggtaacgggaggtccgttgctctgagttatggtcgttaaatccaaatccttgtcaaaggtaatatctcttctcaatttactacccttttctttataattgtcctctccagccttatcacaactgggagcattggataaaggtggatggttattcataaaactatttacgtttttgaatgatttagaaaaggttggaaactggtaaccacttaaactggtgagatttacgctttgaattgaatttgtgaccatggtttctggagtcgtttcagcagtactatcatttttattcacatctgaggacagtgacttggataaaagaaaatttgatcctgagctaagacaactaaaactattgttggcactattgaaaatatcagaattcttctcctcgtttaaactattcactgtcccgctgtttgttgtcaaatcagaagcaacgcagttccaatcgttatatctccaattggaatctgtccatgagcctttttcatagttgagattgttgatcatactattccaaagtatagaattaccggagtaatatttatcatcgcaaaacttgttagtacagttgctcactaggaattcggtgcttgaaaatggtgatcgtttaggcaaaatcgtctttgattttttattagtggttgggagatcactatattgcagccctaaacttgacggatctcgggaatcagggttttcgattgccatagttggtgatttacaaatatcatctgttccataagcatttggtgtagaatggcataggtcctaagagaagaattagaagttggaaaggtaccttcccataatttcggggtttgtgtaaaaaactcatttgttcgaggtttctgtaaagaaagtccaaagccatctaaattaatagtattattaaatccatttaataatgaaatttaggaaattaaaagggggaactaagaaattagttagaatttgtttacctaataataaaaaatagtaacgtgggttgttatagaacaaatatttgtaaaattttgttcaatattgttagggattgttgttatttggagtcaaaataaaattgctccagaattgtcgataagatcggcgattagagatagagattccctagatgataccactgagaataaatggattaaattaaattacccgcatttaaatagtgaatgacaattacaaagattacaaaaaataaacaataaaaaaatttaaagggtactataatatgttatgcatataataatctggcacactttagtcattacccaaccattggaatatatgtatgaatgattaaaatatataaaaattttacgattatactcataaaaataaataaaaattttcgcatggtacatgtttccgataccattttattctggccactatttagctatttttcactcagtgtatccaaccacgaatttttatcaaattactcatataatttaacaaatttgtaaatattaaaaattatctatttgttcttgttactttgcgcctgccgaatatggccaaatctgtttcattgatgagttttgtctgctcgattttttcttgatgctttagcataggatcaaaaaacccttcctctatttttggatctgaactattgttcttatttcgatatttatttttttgcacggttgatactgtgttcttgaaggttttggctgtttcttcatcgcctggttctatgttgtctattaaatactccggctggccattcttatccgttactactttatatttaatgcctcgttccatatccaaaatagttgtgcactccttatcctcatttgagttttctaacgtgagctggcggtaaagcgcctctttcgcagggcttccaaaccatggattgatagtttttgttccggatctaatattttcatttctaaccaatttgcagttttcattaattgtccacaagttagatagaaatccaatgttatagtcagctacgcttttgataaccttctctggggtcttggctctataattttcccggtagactacgtaattttgattataatctttattcactacgggtgttgaactctttggtttttcatcagatatatcaaatgactggtacttgtcattcatatcaaagtatttgtagtccttatcaaattcgtcgttgaagtcatcatgggtttcaggaccattctctccagtatttctatctgtgtcatcataatatgaattaagttgcttagatagttgcttagatatttctcggtcgttatcagggtcagaactaccgaataaattctgaaatatactcggggagttattatatagatctgatattccctgctttattccatcaaatccacttttaaaatcttcacttaatacatgttttaatggttcgatataatcctcatgtatgacctcgatgtaccctttctctggaacaggtttcttatcttcctttttaatttcgttaacagatttctgttccttttgcgaagcattttcacgtatacctttatcatctgtactgtttaagtccattttataaattttattatctttgggcggtttattttctttaaaatcttttattgaatttaaagatgttgttatagattcaacttctatgaaatttttaagatcatcgggcaattcatcgagccatttatttagatcgaagtttattctatccaccccaggtttattaataattgtatcatgattatgctcatgtttttcttcaactttgtttatatttttgggatctactgtattaaaacaagatagcctgtagtttcttctaactgctgacgattttaacgacaaattactcagagttttcctgtatttcattctgacatcacttaagttcctttctagatttgaaaaaactttatttagctgcaatgggtccttatttgaattaagtttacggagaactatgtgagggagataggaattaatcgttgaatcttcatttgcccctgatttcactagaaaattcaaatctagttcattgtatgcatcttctgggactttttcagatttagatcctaatttaaaattttgatctaggcccaaaggctcatcagtatgagcatgatcaggttctgaatatttaatatggactgtagttttattttcattggatgaatcttctatgttagaacatttttctgatgatatgatatctttgaattggtctagaatgtaagaatatggatttttactagttttacctaactcctcagaggcatcagaactttcatctgaattatcctccgaatcagtttctgacgcattatctgacaaaggaacgttgtctttttcataaattctcaactcattttttattgtttttgcgattatatcactcacattattaaagtattggttacgtctaccaagtgacttcaggtagttatacttaactgtatcttccatttatgaagttaattttaatataaactataatgtaaatacataaaaaagacatactgaatgaaatattgaaaagaatctggaccatagacagatccatgagaggtgcaagaaataataaagaaaaatacatttaaaatagagttaaaatgttatggaaataaatcaaaatttctatatattacacatatgtgcgattaaaacctataaaaaccccgaatcatagttgatcctgaacatcacctcaaaaggatgtaattaaataaaaaataagtattctgcatgatttaactcatgttccattattaagaacatattagttctacaaaaatacttcacattttattttccatttcgaataattacacagactgatgtgtggtagaggaaggagaggaatgacactatttacaattttataaaataaaaatcttttttaacttagcttatctatttattaaatataatttactatatatttcaagactcttcctttttaattttttgtttcttcctcgatatgaatatattcagtaagaaaattctcacgctatcagaacatttatttaatttttattatttaactatacttatttaatgatatcgatttatcaaacatgagaatgattgttggtaccaaaaatggtatagttttatttagttaatcattattttattatctacttttggatcaatttttcaattatttttaaattatatggtttctgaataaaaattcatccagtaataacaagaagagtgccaacaaccgttaatctgaagtctcctgatgttgaaaatgatactaatttaatactagaatatctacaaaatactaataaacctcataattcagtcaatgtaacgttaataaagttagattttaatttagatatatgaaaacttacacaaaataatcaagagaaacaaagtagagaggattcttgataacctagaaaaggagaataagatatatgccaaaaaatacaaaaacaataaagtaattattaagtttcaaaggatttataggtatatatgataaaaaatgaacaaaaagaacataacccagcagatgtgcagcggcttaaatccgaagtagaaggtgtattttttaatgtgtaacgttgtttctagaactgaaggttgaagttgatgatcttaaaggcaattatttaattaaaatattccagaataatatgaaaactggttcataataacaaaacgttttagataacacaaaagaattggaaaaaacgataagctacaacagagtagcaatagaaaaatataaggaattgagtagtttgggtgcgaaatttaaaaaatgtgggtttcaatagaattattatatgaatgtgtaagagtgttttaaaacaataatactgtaattaatgaaagatcacagttattaaaattatttagtgaaaaaggagaatgagaagatgatgaagagaaatgagaatcagaaacatgaagatatagagagtctaaaaaaggaacacgctgaaacacattataaatggaacaaattaaagaaattttgtaaagaaatcatacagttgttgagcgaaatgaacgaagtatcccaggaagactttatggaaaaccttgggctagaaatggacgagaactttatagaagaagaactatactatccaaaagaagtagaataaataaaattaattattatatgatacattttagtataaataatacataatacagctggaaggatagcactatttttacaccctttgtaacaatccattcaaaatataataacataatgtatatttaatgtattttaaataaccctcaaaatgggtttaaaatgaatctgttgaatttattcaaattctgctttatttttcatctgttatatattgattatatatactgttttgtattttataattttttaaacccagaacttaacaaattaaaccatacacaatttcatttatcagcatcaagaaatcctaaatctagtaaatattttaaaggtgaaaaggagaggtcggaagaagattttcatcggattctagaaacagcaaaatcacttaacctaacagaaaaggacttaaacgagtacgcattaaagcatctcccaaacgagagtttgaggaagaggtttctttatctaataaatccaaaaaaggttgagaacctactcccgaaacgattacgcaaacatctggcaatattgccgcaaaaaaatctagaatattcaatagacgaagcaataagtagaataaaaataatcagcggtacgaagtttgtggaaggaatcgacgttgcaataaggataccagtgactactaaaaaggcaaaatcgacagcaggccagtactctaaattaataacaataccatataaatcactcaaatcaaagagaacaaaagtaggaatattcggaattaaagatacggtagaggaaataaaatctaaaggtatgaataatttatgtgtatgagtgcaataaacttttaggacttgaaaatttagtttttattggcggcgaagatttgataaaggagtttaaggaaaaacaagaggtcccagaagtaaacctagttctatcagacgttgaaacataccccaaactgagtcttttggggaaattgttatctaaaaaggggttaatgcccaatttggctgttgggaccgtcatagagtcaaaaacagagttcctagaaatagtagacgacttaattcatagaaacgttctggtgattaaatcagacaaagcaggggatatcaagtgcaatttcgcagatgtatctatgccattggatgaaataagaacaaatttgctggaaatatttaggtaaaaacaaatataaaaactaatgattgacattaatgtagatatttgaagaaaaataagcccccttactcaacgcaaaaattcgttgataagatatttatatcatcatcaatgggtccctcatttagattaaacgttagacaactgagaagtaattctaaataatttgaatcattttaataattggagttcaatttaatacaataatggatgaccctgaaaatattttatataaccagtgcattggaattgatagactttgtaacgactattcctcaacaatagtgacgtacctaactaaaggaaagtatttaaaaagaggaaagaaggtgtatcataaagatgtaccatcagagatcccaaatgtattgccagttactttctacacaaagtacccgaaccgctacaatggagtgtgcaatcaccttgttcacgccgcatcaaatcgcaataagttcccaaacatttcactaaaggtaatattaatatttgcgaagttaaaatagttatgaaattagaatatttaaattaaataatacctgtttagtggtttcccaacgggaggatgttgttggcaggaacacaaggtgggaagtttatcatgtggaacggaataacatttcaatttgatgatataaaacgttttccagtaatttaaaattttttaataattacgtaggtgggaacaggtagcgtaacctgctttgagtggtcaccttttggtgattttttagtcgcaggagatgaatacggaaagttggcactactctcaccagcattgtcactgttaaacactaacttatatgaaggtttcattaacaaacattaatatttattaaattatgccttaataatatgtatagggatgaataatggtattttggatttaagtctgtctccaaacggaagtaaattcgtggcatgctcagatacatactctccacatatatttgatatacaaacgaccactttggaaggcctattagtggcagaaaatataggatcgacatcgataagctgtttacagtggaacccgtacaaaaacctggtggtaacaggtagtagaacaaacatagtgacactttgggacccaatgaataaatcacaaattacatcaatttatgcacacaaatcaccaattcataaaatattatggaatccaaatggaattacattcctaacaacagcattagatggactagtaaagctatgggatgtgaggatactaaaaccactgttgacatacaaaattggagcttcgaaccaggatgagtcagtttatctaacaaatgtcaataatataaacctgttaaagactagcaaagcagtgacaatagtaactgcaatgagctggaacccagtacaaacgaatgtatttgcagtaggcgataacaaatcaagactcttccattttacaaccgattttactgaaccagtatcaacagtagatcttagagtgacagacgagaagactccatccacaacatcaatggattttcatccgtttggacacttattggcgacgtgttcagacgacagatacgtccggttctggagtcgtagcatcctgggagggtataacagactatatacacaagattccgactttgtcctggatgataaagttaaacacgcgccattcacaaggtttgacttcaaaaatgatattgatgtggaaagaataccttcaatgaagaacacagataagtgaaggtgtttgaaattatttataatttattaatatcaaataattatattttgtaaatatttataatgtgtaagttgtatgttgaattttattttggacaattaatacttaaatggatagtgactaggaatgtgttggttgagtgggttaatttaattcgtctttcgattataaattttaatagatttgtaagatagtgtataattatttatttagaagtcatgctttttttattttatcaaatttaatatattttaaattcgaaaatgtgttaaacttgaaataatggaatgattccaaataaattttaaagatatcgcaattttccttacataaaatggaaaactggtaccaaattggtgacaaaaatattagaagagaggtctggccaacctctcaaatcaacagttcacccgaggatataaaagccataggtcccctgggaagtatgttggcgatcgtatcaggagatccaaagagtcttaatacagatgaagaaaatgtaaagtgtgtgctgagaatatataatggctcatgcgttctcgtaacatcagtgaaatggtacgtaagttttgaaaacatcctggctatccagtggactgattcactagaactggtttcagtatttaccaatggctgtgttagggtttactcagcccatggagaacttctacgttcattttaccttcattcgtacggagggtcaacgaacaatagaattgaagtggacttaacaaagtataaaatctggtctaacgggctagtttttatcaattttggaaaccaaaggctgtacttgcaaaaagggtttgaaacccagaattcctgggttgttgaattgagtgattttgcattgtcagttacagccttgggaattgttgcaaaccataattggaatgaagttttggtgatattttccactgtaaacgggacaaactacattaaaatggaccatctcatgaaatgcacaaattttgaagacttccaaaaatacctgctgcaaattaatccatgtacctacactcacatatctacatctccttaccactttttatacacaaatttgtcaacctttgacctagagaattttaatcaggaacaggatactaatttaaataccaacaaaaaggttaaaagcaataaatatttcataggtatgggaaataacgaagaaggactccttacaagtttgtgtatagatgatagaagcgtgaaaatactatgggaaattaaaatagacccctttaacaacatttatactatgagtgaaggaatattggccctaacttttaccacaaaaacggacaacttatcaaatgatccaaagtcacccagctccccgccgatattggatactgaaaataaagaaaataactcaaataatttaaatagcgagaatgatgaaacagaacagttaattagaaaagataaggaaagtaacttgattaagctgatatataacgcagactatgatttgaatatttacacacaagtaatagacattttaagtgatgttggtggagggctgagagtgtttacaaggaataagatggagtatttagatatagtttcaatttatagcgaggtggcgttatccccagaccgttgtgatgttactaatagtcttctcagaacatatgaaatgttcaaaaacggagatgaaagttcctcagaatcactctattcaatacgagataagctacatagagcaagcaagatatgtttggaggcatcaaaagaccagtggaattttgaaactgctctactactaatcgaattttctattttttcatcatcagtcaactctttaaataacccaagtaatgtgaatgacaacactgaggaagatgctatttctgaccaaaagtttaaaagcacagaacttgttaaagaagatgaattgaaaggagatagagggcatatattaataatatgctatttgagggtatgcaaaaatctagttgagtataacatatacactaacattaaccaactcctgttattcggacttaagcgtttaattgtcctgctaacaagccttaagttgtatttgttaagcataagaatatgtgaatttttcagaattagcccagcattggtcttactggggtggattacaacaaggattaagctcggaacacatttaacagattctgagctttataacctgatttcaagtcgacttgacaagtacctaggaactgttttatcgttttcaaaagttgcccaggtagtttttaagcatggaagagacgttcttgcattgtcatttatagagcgagagaaatgtccatacaagcaatttaaggttttaataaagtggaatgaacttagtagggctgcaaaggtggcaaatgagtgtggcgacccaactctgataaacttcataattttaaagaccgtcagcaataacgatatttctaacataataacactatcaaatgagtatggccttatcaagaacatgtttgttcagcagctgcttttgagtggcaatgataaggtgctgcaggtattttacgagaggacgaacctcgtctttgaagctggcctcaacagtataaacatatataatcgtaataatccatttctaaccagcagagaaggaggtcgtgatgggaaagacaagagagatgaccttaatagggagaggaaatacagtttaaactatagtaacggctactttggaaataagaccaacgtcgatgcaacattttggcatgaggctgtcaacaatgaaatggtccttctggaacatcaaattaacctcgagaacactcatgaatcacttaaatctatcaggttggtcggcaggagcctgatggaaacaatttatgagctttacaagctgaacttaaccaaagaggttgaggttcttgttaacaccttcaagttacctattaatcaaactcggtgtacaaaaatcgcggcctaccacaaaactcacaacgtccaggagctgtttaatcttattcaggacaaacagttttccagtgtttacattaagcccaactttacctacttccacctacttttgcaaactctcattagtctaggtgccaactctcacgttgacactgtgattcacggcatgaaaccttctcagcagaactactggcgaaatttcgtcaaccagttcaataaaaactaatttttactaagttatatatactaagttatatatactaagttgtttttactactttatatagtttatatatactaatttgtatgtgtatagatatttatacattaattggtacattattggtcttcttcccggtcgttatcttcaggttcttcatcatccttagatgtgtcatcaacatcatgatgttcagtgtcgtcatcaagatcatcatccgcatctccattcggatccccatcatcatcctcgtcgtccttaagatcttcagcatccatatctgaattgttattgtcaggattaggagtatcattatcgttatcggtgccattatcgacatcagtatcgtaggaatttgaagcattttcgttgttggtgggtgtgtcatcagtattggtttcagttttcgcattggactcagaatcaccacttgtttcagaacttgaatcagttttagggtttggttttgcgtccttttgtacatcagtagaatgatcaggtagaccattaatcggaagatttagcgatttgtttgttttcagaagagtttttatctgttccccagttaaggtctcgtattttaggagttcagaggccagaagctcaagctgacttctcttactccttagtatggactcagctatgtgttctgcctccttgattaactctattatttcattttcgattttaacgttgaggtcagtgcttaatttgttgtttaagttatttaggttatggaagtttagtgatgctagtttattagacatcccatactgggttatcatcttgtaagcaaggtctgttgcaacaatgatgtcagatgatgcaccagacgttacattatcgaatccaaaaactagtttctcggctaatcttccagccatgcaaaccgcaagtcttgatttcatctcgatgagtttgtaactacttttatcataatcatcgtttggaagctgttctacaaaccccaaggcagttcctctagtgattattgtagccttgtggattgggtcagtatttgggtaaaggtaatatgccactagtgcatgacctgcctcatggtatgctgtcatttttctctcaatgtcaggcattaacagcttccttttatttcccatgattattttatctcttgcctcgtacaaatcactcaactcaaccattaaccgatctgcattatattaatgttaattatataaaataataattagttatgaataccttgtttcactgttatcagcgccgcctcattaattaagtttttcaagtcagctcccgagtatccaggagttatcttagaaagttcctttacatctatggtttccttattgtaggtgacgtccttcaagtagtgttgtaaaatctcctccctgcccttaatgctaggtaggggtatgtgtacaactcgatcgaatctacctggtcttagaagtgctctatctagtgcgctaagcctattagttgcagctagaattgtaattccagttgaaacgttaaacccgtccatttcaaccagaagttggtttaaagtctggtcgtgttctcggttctgtccactgaaagagcctgatgctctcttagaacccactgcatcaatctcatctatgaatattatacacggagctattttacgggccttatgaaataaagctcttatcctttgcgctccttgtccgacatatatttcaacaaattcaggcccacttgtatatatgaagggtataccagtttctatggaagacatattagttaataaactaacctgtggccacagcttttgccaacattgtcttacccgttcctggcggacctactaacaaaatgcccttcggaaccttagctccgacttttttgtatagaaagggctgctttataaacttaactatttcctgaacatcctccttcgcttcgtcgatacctaattagattttatagttatagcatgtagtaagtttacaactagaatttatagttgaattatttaactaaaatttaagattaaagttcaaaatttcatagttttgttaaatgaaatacctaaaatgtctttgaaatgaacaggttcaaatgtgacctcgggtttgggagggggatcttgttgtttagtttgggtctttggtggaggaggtgtaggtggactcctcttcttaggttcatttttaaaatcgttaatattatttccattatatagaaaatgtgaaatcattgcaaagaagaacatggtcaaaaaaaggcccaatgctatgccgataacgtaaagaaaaactgatttagcgatagacaaaatagttgtcaagaaatctagtgactttgaagatgcttccttggacagttttttaaagaattcgataaatgagctaaaacctgatgagatttcattcgtgattgtggaagatcctctagaatcagcgttttttgatgtgttgatacattcataaggaacatggagtccaaacccagttctgtgttgttgtgaaggtttgttataattaatgcctgtgctatttggataataaaacagattatttacttcagaatgggataataacagatcacgctcaccagatcctgtgctaaatccataaggatcatcatttatatcatcatattggtacacaggtcgtgtctgtgctgaattatcagaatttatatcaatgttgcttcgttcttctgggaaattatggccggtgaatcttgagttggccacgacagggaccctatgatctgaattgttatacatttaaattaaacagttataatgatactaaatttaaatccatatttcagataaaattaacattgtttaacattatacaaattgtcttataatatttatcatttaggaatccaataattccacccactacaatatccttccaaggataaatattgattaataactacttttgtccattcttcttataatttttattttataatactatttattgatagatttttacacttttattctcatgtgttgacttttatcaaattcggatcttatctgtaccagcttctttaacttaattaatgactcatttattcgacacattttctatttatatttatcataattattaattttttgtttttttaactattgtttagtaaatacgaatacctattcggtattttgatttttagggttgtgatatacacttttcctaacacacactaaactacagttttaatcacttttatttatagatgtgttatattaaaaaatattttttgtaatttttttatcacttttgtacattattaaactttaatatttacaatgatatttaattaaatgaaaatcaaatcagaagatgaataattttagatgtataataaggaaaataataaattttaaaaccagttctcttcatttaacaaaccgcagtttttatactatatctttttctaatttttatctcacacctcactctgttaacttttttcactctgacttcaattcttccaaaccaactaaaacattaatagattcaatctcttatagtataaattactattcaagctctaaggataatgaaggagccgttatagagtctggaagggagtttgatgagatccaacaacagttaaacttttctgaatttacctcaaactactggaggagcttgaggctatccaaacctcttctcctaactttcaacgtcgataaatcagtggaggctaggctaatggatgctgttgtgggttctggagttttttgcaaaaacgttccctctctggacaatctatttgaaactatactccaatacaaggaaaccaaaggtataaatacttttagaaaacatttggatttagatttgatcgggtgttatatgaatttagacaataattatgaagcgttccttaacttgaataaggttagaatttgatttgaaaagttttcaggaccttttcgagaaaataaaactcagctgtaattctgtctttttagacgtcacttacccctactaccaatcagttgacgattatatgaagatttctaaaatagtattttttaatcgaattttaattttcagataaatttaataaatcctcatgttataaggttctgtaacggaactctaaagtttcttcttaatactgaccttgaatgcccacttctaaaagaaaactccaccaaagaagacttttcactagaacgatgttattacctctcagaaaaatacaactctaccgtcattgactcaagttagttcctataaaaatatcccttttaggtgacaagatagccgtaagtaaccacaacaacatggagataattgttttcccaaaactacctcaaattttaaataaaatccatggtatttaatttttatcatttacaacacttatatcacttaaataatttaaataaattttaatcaaatttctttaaaaaattttattaagggtataataattgttctggtgctataattgcttccatgactacactttccagtgaagacttcctagttccttcaagtgcagcaatctatgggttagactttgtttctagtgaaagtgcaaagaaagctaacgggccaggatcaatggtttgtaaacaatttttaatattgtttagttttataacttcattgacaccttatacaacctgtcgatgtcacccgatgacatactcgaacataaaacctctgtaaaattttataaaagaaagtaacttaatctcctatctaccgtttaatagatgtatttatgaaattagatgtctaaatcctccaaatgaaatgcttgtgagttattgaatatgtactgcttccttgactgaacgtctgagcccattaataatttaatgatttctgagatttctggctggtgactgactactatgcgctttaaaattctcttcttaggatccattgttgtctcccataactgatttgccatcatttcacccagacccttaaatctctgtatgatcaaatgcttgtttgttttacttagagttttgtttatgttatacaaatccaactcatcactttgtttatcctgggttacattcgatcccaactctgtttttaattctatttcctctacattcccctctcggtcatcttcattatcttccaattcatcttcatactggggtttctggtcctgagtatcacctttctcctcatccccatcagttgtttctttatgttcatacttagaatttagttcctttattgtccttaataaatgttcttgtgaccaagaatatatatactttttatttctcaggtttgtaattctgtagagtggagggcttgccacatacactcttccatgcaaatacagacttgggcaaagtctgtacagtaaacagagtaaaagtgactttaagtgggagccgtcaacatcagcatcagtcaacaatatgattttcccgtatctcaacttgttaaggtctactcaaattaggtgtaatttaaacgtactgttgttcatctctatgaatgggtccaatgccacatccgttccagcaattaaatccttttgtctccatgttactggatttattgaaattccaatactgttcatcaaaagctaaatttggtaattaaccaataataactatacctgaatctgttgattttccagcactttactattgtctgttatcttttcaatgttaaggatcttccccttcaggggcaaaaccgcttgaaattgtctatttcttgcctgttttgcatttcctgctgcactttcaccctcgactatgaacaactcgttgttctcgacgttgtttgagctgcattcagtcaattttcctaaattgtaattattaaaaaattagtgaaattttaaactaattaatgatccagatttaaaaaacctgagatatttgatattaggcttgacgatttttgtcttataagatccttagcactcctggctgcatcgaatgcttttttcgcagcttgtgatttattatgtattgctagcaacaactccttattattctccagtatgttagtaaattgttcatttacaatctaaatttattaattgaatattgttaattccaataccttctctgttactgtctttactaatgcatttcccagtttagttttagtctgcccgtcaaactcagctccggtaagtttaactgatatgacagcagtcattcctaataattgtaaaaatcaaattttctcaatattagatttatatataatctattttagagttaaaccttctcttatgaattctccgtttaatggcttgacattgcccctaaaatagccatacttcttcaggagaccatttacacactgaaaaattattttaataaacgaaataattattatttatttagtataatactcgtgttattgaagttttaaatccatcaatgtgtgttcctgctattgtgctaacgttgtttgcatatgcctttatgagagctgtgtacgactccagtgaccaggagaacgacacttcaacgttaacattgttaataactcccctaattctaaaaaataaattagttttaatcattttttaaatttaagactagaaaacaaacgtgatgtagcttatcggcttatacagaggagttttatctttaatcaattcctccaaaaatgacctcgtcccaccagtattatggtacaattcttcccacggttcctatgttaagttatattttttgttttagcttttaaaacttacattgttttcattgcttatgcggtagtcaaccaatttaatgaataaaccagggtttaaatatgacaattcctttgcgcgggttttaatcaaatccaatatgaatccgttcttacaaccagagcatttagtatctaaatcatttttgtcggtactggtaccagaattttcttcgttttccgtttcagtgtgttggtggtgcgttttaaaaatatgtttgtaatcaggcagaaaccttattgttgttccatatttttttagatttggattcggttgatcggtggtttcaggttcggagaattcagtcagtggtttagtgatgttccctttggaaagttctatatggtaacttttagaacccttgaagacatccacaatcaggaactcactcaaggcattaactacacttagaccaacaccgtgtagtccactgctatattcataaattctcttttcctcaagttctttgctacctttcttgctagatttagagtcatttttatcatcaggtttaacggaaattgagttcggagggaaaatatcttgaaatttgcctcccgaatgaagcacagttaggacagtttccagaccagattttcctgttttgggggagatatcacatggaataccccttccgttatctgatacttcaactgacccgtcattcatgagactcacagttatcttattacaaaatcctgccaaatactcatcaaccgagttatcaagtacttcgtacaatagttgatgcacacctctttctcctgtatttcctatgtacattcctggtctcttacgaacagcatttaatccctccagcacaattatatcatcgcttctgtactcttcgttatcctgtaattgttggacattttcttccctctgatcatcatcagtgacagaagaaggtataaaatcatctgtattttggttatttaactgaaacttatatgtgtttttgttaacagttttaatgttatcacgagatgaaacatgattatccagattccgtatgtttatttgggtatttcttattattccatttccatttaacaaatatcctgatgatacttttattatgttacataaaattattagtgtgtacaataatctacatttatcattattccaaataagggacaatgaacttgaaatcattaaatatgataaattttgatttgtatcagttaaattgacttttatcacggatagtaaaagaaaattttggtcataaatataagttcttaatcaagaaaacaaaaacaaatttacacaaaggttatgtaaagattcctaggataaatttacagaatatcattatttaattataaatataatataaattataaattatttatttgtaaaacattatattatttaaaaatgtgtcaattaaagtggtttaaaataataatcactacaataaggccaacgtgacgtcggaattaatgatgtattaatttaattaattctatttaaaattctttttattaaaaaatatttcagcttgtataattttaattttaaattattttaatagtcagtaatatgatttatgtgtgtaggaactcgttgtgttgttgatttttaactaaaataatttataactcaaatgtgtataaatttcacagcttattattgctcatgttattattttgatggagtttctttttaattttttcttcacattgacatatttggctgattttggggaatgctctggaaggtttttttctcgatctttagggctatcaaactctcctgtgctgttagtttaacaccacattaacaattttttagtcagaatcaaaccagtagggatgaactgtaggttatgcaaatgaataagtgtgtgtagttcttttccttacttgaatgtgtactacaactttgacccaaaggactggagtagtattcgagaacaacaatcaagtaatttttagtcattttattccttttaaggattgtctaactttcgtaaaaggctatcacgactacggcgtcaagtggtcaccgatatggttattttttaaacacacaaaaatttcaggatcgtattaatcagttcatggacattgagaagaatctagcaattagtaggttaatatagtttaatttctagacgccaggggtaaactgtttcaaactgctctatctaggaatgtactaccaattaaaacaggtaattaacttatgaatatacagataccctagtgtgtaataactgtaaaataaaattaatattttacagataaaaatgagaagaacagggaaccaattcgcttgtatgacaatgtcacaaacgatattcctcatttaaattatttgtacaaaatgaaccagtaattttatacctttcattttatacattcttcattgaaaaggagttatctacttgaaaactccatctttaaaggaatacagtgagagagagtgtttatcagggaatacaattcaaagtgtgtcatgtccgttggtgttatgcctttgcatatgtagtgcgcaagtgaatttatgtacggaagtacttccacggacttttttgagttttcaaggaagtttatgtggaagtttatgccacgtttgcactctaattttgaaattggaggaatcggtatgtcaagttccacgagagcttctagttcgtacagcatgaataagagtgcttccttgcaggtgttatctctaacttgtttttcttcattgttcagttccgacttatagtggtcaattagatccttatagtctacggggtattcatggtcatctaccacactttcgttagaatacaaactcttgaaattcgtcttactagacctcgtttcaaacctgacatcttcttccttgagtttatttggcacataatccaacttatctttgatagaggttgaggtttgaatcctttcgtttgcaaggatattctttgtctcctttgggttgttttggttggattgttgctgtaagttaattctcaactgagaaattggcttaattacgtctttcaaggatatgtcgggataatttggtaactctgatttgttggtaggtttctgtgagtttctgaaagcgattgctagttttctagccccttcgaacccatgcttgtttattgaaaatatcttctcaattcttttgcactttttgtacgcctgacctacccaacccattcttcgtacagttgagttaaaccatactcctcttatctttggtagtagtttgctctgtcgaatataagattgcctcaattcttcagagatcacataaacattttctgtttccgatgcttttttttctttttctaatacttgttccttgatcggtaagttgtcaggtgattgttcttgttcttcaaatgaagacccctgtgctttctccaagagttccttggtctcctcaaccagttgttcctttgtaacttcctctaactctttctccttttccaataactggtccttatcaaagggaaattcctccttttcaggatctttgagagttgactcctcagtgtttagtgaagagtcatttgtttttaatgaaaagtcacagttatcgttcaaggaagttatgtaatcatcactggttgtataattgtcaatagtctcgtagttgtcgctgacttcgtaattatctatggtttcatagttaaagttactcagaacttcacttgatgatgttaatctggtatctgtatcgttcttgtccttaagggtatccctaaccttatcatctaagttagcattctcgttaactttgtaatcattttcgtcataaacttctttcaaattagtgaaattttcctcgagttcactgctttccttgtaaatttcactcaaattgtcatccttttgaaagtcgacatcacttgaatagtaacctaatttatcatattcatagggatttaggctattccttccacgttttttaggtctaagtgcctcggcttcttcaaaatttaaatcagaagagtcataagctttgtatgattcgtttagtaagggctcagtgtcaactgaattgtcgtcaaatactccaaactttgtggctttcatgataagctacgtttgatttaaagagatattttacattcagggagatttactatatattctagtaaaaatatggtacagagttacaaatataatacaaaagggaggtggatatatttacggggtgtaaatcattccattttaaaaaactgtcttatgaagtttagcaaaccaaaattttctggtttctaatattctagataagattcaaattaaagtaaagcacattcggatgtgttaaactatgtgtaatgttttgggagtggtttcacgtattctcaatttagaaaaggaaactaaataataacatcaactaagattagacaaaatgcaaaatgtgttaatataacgtaaaatttaagtgaatttaagaaggaagaattaaaataggtatagaagtttgaactctcaaatgatgaagaaaatacaaataacgagaatacaactaaattattttaaatttagggcaaacgacaaaatgtgcaaaggtgtgcacgtggaacataattacgttgtctaaacggggataaagatgtgtaagaggctatgaaggtggtaaatgcgtaaaattgcgcatgcatgcttcaaaatagacacattagaaaacattctgcattaatgtgtaaggaattaatcacgataattcataataggattttatgggcagattaaaatgaaatttttttaaaataatctaggattaatcctagaagtggatatcggcacttacatcttggtgcaaacagttataagttataaaacgtaaatttattatgtattttaacaaataaacaattgatttggacaatgtgtgtatgtattaatacaacatccctaaacttccactgtgtaaacaaccctgatgttgtgctaattatgttccactataaaatactagatttaataaacataaatttttatgaaatgtacattaataaaaaatatttaatgtgctggagggaaattccagggggtaggtttggcctcctcagaatcgatatctgtatcttggccttctggtctttctattctctttaatttccttctccatggagttaaatccatctaaaaataatttaaacaaataaataagttactatttgattttgctgggtcggaacagtatctggtttcctgttatatgtgtaagagcctccgtgtatgtgtggttctgttggatccggtttcattctcatatggtcaacgttttgatttagctctggaataatttcccaatcatcatctaaagctttcaaatttgtataaatccgtacctgctaataaattcggtatgggcagcttccatgcctcctcgtattctcccgtatatgggtcgttttttctatttggtaaataactaaaatctgatttctttccgtaatgtacattcttctttgttattgatggattctttcccagctcgaagtccatacccatcatcttaacctcgtctggaactgagtgttcaagtgtcactattgccttcttatacataggcccatttctgtaatatttaggtagtctacttgaaaagtctctttttattctaggtattttaattagtgtgttaactttaatgaccttggcatcgtaaagcttccttaaatactcccttatctcaaacttggtaaggtttattggaactcttagggcaagtctgttccgttctagaaacgctcctgttctgtgaacacatatattttgccatggaaagaaaatgttcctacacaatatatatgaggttaatgtaccttggagatttaggcggagatgaaagaattctggtcaaaaacataagtggatatcatataaaattaagtgaaagatataatgttacaagtgtataagattccacccatgaatcttaaggaaggcatccatccaatttacatattctcgttttccaaacttcggacttaaattgaagtaataatagggcttattcgagatataaacattctgaatgaaaatataaaaagaaaaagaaaataaacaaaccttgtttggtagcgacacatgtgtgaagtcaaaaggccctatactaaacacaccaccttcaatattagaatcaatttccttgatttttagaggtacaacttcttcaatcccatgtaactcctatgatttaattttaatttaaggaaaaatagaattctgctcaccttctctttaatgtaattctgaaatacaacattggataaaaaacatgaggattctttagaaatatttttatttagtccgggattctacaagtaattattaattataatgttagatatggatatcttaaatatttaactctttattaaataccctatttagaataaatttgacagacaatttgagatagaacaaatccgataaatttaaatcaatttccttcattgaaattgtccgtataaccctgtcaaatagcctttccatttgagtgtcgtagtccttttcaaaaagctgtgatattgagtagataaatatcaccgaactgaccaatctcccactagaaagctcaataaagggttcgaacatctttccaaacaatgtagactccaaaattccacaaactctcttcgcgtcgtctttaaacagaccagactcagacgaagttaacagaagagttgcaaatatatcactcaacttatggacatcggtggtcgagtttttgatttccgtaatatgatgttgagtattattttgattatttgagtcgtttgtcttataattcgataatagttggttgtagtgattgtgtgttaaagataataacttttttaaatagtcctggtcgacatagaacccacaagtaataaaattatacagtgcattggagtgtgccttgagttggtttagttgatttaaaactactttcaaattatcaacgttcaaactttcaagttttttcaagtagtcatctggaccagtaacgttcaaacgagtcaaaaaggaactcaaatttttaccctcatttagtctatccaaaactataaaatcctttacttcgtcacaatattcctgaaactctacctctgcatccttatactcttctatatcattcaagtcttctctagacccgaatgtaaaacatcgtaatttatgtaaattggaacctcttacaaacttggcatttgtgatgtaaaatgggttatggaatccaaatattttgtgtattagttttaatttggtagtgtgcattatgaactatacgtttgagtaatgaatttgtattaaacatggtacgattttttgtgttttaataattagaagtagtgaaatgagattttgttagaaaatgataccgtttttgtagtttttttaggtccaataatagcatcatctgatgtagactcgacgttattgtcggttttgacatcatcgctgtttttatcgattcctaaatcatttattattttagataatcaaaaataaaactaatatttaatccaggaggggaatttctatcagtttcgttaccttcttttgatgctaattgatcggaaggagctacacatttagtatcgtcagaaattgagctatcaacgagtaattcagacatatcattattgaatattaacttaatcagcttgaatttaaatattttgggtaaataattgttaataaatgaaaaaactctattatccctaaatttttttcttacccacaaacacagctttttaaaattaatttgttcaatagaagatattaaaaaaattagattattttttataatttttgattttgtaattttgaaggtttgtgtttgaaaaaaactagattttttagtagaatccttggtcgatatactggtaggcattgataaatcaagagaattaatctcataatataatatatttaaggtctgaatcagactcttaattagttttcaaatgttttccccaaatttaaattgataatttagcgcggaaatcttattttttacacacatttaatatttattatttatatttacatttaaattatttgactaaaatttcaatgttggtatatactattaacacattgaagaaaaataaaagcctattagagtataaaagattgtaaatacggtaaatcaacagggatgtgtacagatgatctataccataataatttttatttattaatcaaacattttgtaaactcatataaggaatattaatatataaatataaataaataaattcaaataggcaaaatgtgttaaatagttaataagtaaggataataataggaatggaaagtaatggatgtgtagaatcaaatctgtttctataataatgaccacaaaaaattagtaaaaggttataactaaagttaaacaagtttagagtgtattaatataataaatttaatgaacatttggcattaatagataggtaatattagtaacaggatgggggttcaatattcaaggtttacataattgaattttttattttatccaaagcattctaacatgaatcatttttgacggtttttaataagtgtgttactccaaaagatattttatcagtttttgatattttgaaagatggagaacgatctgcttttggaatacattacagaatctaaaaatctgtcatttttatatgacccgaaatcatattacaatcaattatgtagtatgatgagaaatgccaaggagaagatagtgatttcttgtctatacataggaacactacccttggaacaagattttgtaaattgcatctttgaagcaaaggaaaataaccctgatttagtcgtagaattgctcctggataaacaaagatctatgagaagagaaaatacaggcaaatgtatcctggatttaatcaaaccccttttgaaacaaaagaatgttagcctccgcttataccattcaccactgtgtgacccactttttaatgaaatattgagaccgccatattcggaagtactaggaacactacacatgaagatttacgtagcagatagtgttacggttatcagcggagccaactgctcaacaccatatttcacaaacagaatggatagatacatggttgtggatgacgagcttttctcaaatttaatgcgtacaatagttaagacggtgggaacaatagcatataaaactacggaaaatttagagtttgtatgggactctgacctgattaacccactggatgactttttgcttttcaagaaacaaatctatagacgtttcgtgactatgataaagatgtgtaacgacgctttggagccaattttaatggcaaaagtgttcgcaaacctgggccctgaagagaagaaatcaaggactggaaaactgtttaataagcttgttcaccgcaggaaatctttaagtgggacaggcagtatattaagcaatcagagtgttggccaagaaacttttgaccactccagaagagaaagcttcgacttttatacgccaagagatgtaaacgaggaggaatttttggaagagttgtacatcaaagaatcattaagcggcaattattcagtaagcccaagatcatacctaaaaaggtctaacaataatagcattaatagttggagaaatatgaatgggactgcaagaagcggtagaaacatgaatggatttaaaactatcagacacaatgggaagcatgaatattgctcaatatgtaataactatagcggaacagtacttgatgacatcgaccacactccatatcgcattatgagacgttatccaccgatggaaggttttacaaggtttatgctgttcttccagctaggattctcagacccgccattcagacaagatgaggagctctgcaaagacctcatgattaagtatcgtaaatcagggcattcattaattttggcaacctcttaccttaacttcaccaaagattactcagatttggtaacatatatgcttaattgcaagagctcagagaatatgggatcattttatgttttaacttcgtcccctacagcgaacgatttccacaactgtactgactcaaagaggctaattcccaagttatactgccactatcaaaacctactcctggaatacgtattcaagaggagcccacggtattccaaagataaggacgaagaagaaaatgactcattctactatgagtatcataacccaggatacacattccatcacaaaggaatatgggttttcgaaggagaaatacccaaaaacgccaaagatcttacatttgaagagtttaagaagagtattaagggaccatgcgccatgctgataggaagttctaacctgtcaaggaggtcccataacaaggacttggaaatgaatattctggtagaaaccaactcagttaacgttttagatccactcaagtacgaagcatacatcttgttttcaaacgcaacgccagtcaagaaaagtacaacctcaaaaagatcaaaactcatttatcgtatatttgccttcatccttcgccaatatttgtaatcccccatcccctactctctttcattttaatgtattagcatattctattttttaaacagatttaatttaaataactatatacagcaaatggtaggattaagttatgattcatgtgtttcacctgctggtactatatgtgtataaattccaggtcgaatcagtttcattaaattttaaaaatatttgttttgttcattttaataatattagtccccggttttatccctcaaagtcaacaagcagtgacacagctgacttcaacgctacagaatcaccttccattaaaagtatgctctaacaattataataattcacaacgttataggaattgataaacaattttttaatataagtgataaaactaacaataatagtaaaaataaagaaaattttgacaaaagtaagactataaaatacataaagttgtatagttaaatgggcgtccttcgaagctagaagatttacctacaaattggcaagatttaataaaaaactgagaaaggtaaattttaaattataaatttagttaaattttaatttttaaccaggttaagaacaagaggaagctcatatatagtaatttcgatgtggatgaaaatgaactcaagaagattaatcttgaatctagagatataaacaagtcaatacagactttcagagctctgagaaaatcatttttaaaatttttaagaggtttaaggttaaacaataatccagcagtaccctatgtgccagaaaccctaagaagccataaaatacctaatacgtactatcaattgtctgataaacctagtaaaaggcgtcctaaacgtactattaaggataaagaatctaaaaatctatctaatatcaatagagataagtcatgtgtagagaagaaggtcaagaggaacgatgaatatgtagatttcttgaaaatattatcagaaataaaaggcaaaaggtactacaaaggtaaaattattggataatcccctaattataattattatggaacctccacttaagaataataaaaatacacctcccaagggtaattctaccggagttaccatttttcagtggtttcccaaaaaagaagatcctagcccaaaaagtttaaatgaagaaccagatcttagggaaaattcattactgcaaaaggagagtgaacctcagcaacctaatgaatcacagaaacaaggccagaaccttcaggaatacagagaccactcaggagacgaaagtagccagagcaaggaacctctgggagatggagatggtgagagtagaaggtcgaaaagaacagcagcaataaatcaaagattgctgatgaagaaaatcgcatctcacgaaccaaatattgaagatgcaaaccaagatgaacttaaatattcagataaaggtgccgtaaaaaggaaaaggatgaaaagagagcaccaacgatcatattccggctctaacgaccatgaacaatttttcaggccagtttcagtcgcatactcgactaaccaacagttttttggactaccatttcaaccacaaccttactataactaccagcctggttttggacagcagaggtcattttcagatacctcagccgccagttacagcaaatataataatagttatagcggagagagttatgttaacaagcttactccagaacaagtggagcaccaggaccttttagcccaacaactgaacgagttgaagggaagtgatgtgttcaactttaacgagttcgaatatctgacctcaaaacagaagaaaaagaaaaaaatattaataaacaaggaacacatatttataaaggggttaaattacattgaaaactactttagccaaaaccgagaatcgcttctgcgcaaggatatttcagaactgaggaagctggggctggaaaatgtgcaagtggacccagtgttctttattgagttgggagggaagtatgaacaattcaaggatgaaatcaaggatataaacaagtcaataaacttgttgcagtccaaattaaacgaactgcactctgaaatgggtaaaaccataccaaataaaattaacgagccttcaccctttagctgctcatccttatcgccaacctcaagtagggataaagataaacatagtttaaagtttgaggagatattggaggagatgaaagacttccaggatcttgtaaatgacgagcacaaggagaagaggaagatatataagaatctcgtaactagcacaagcaagtatatgataaagatggagcaggacctcgagaagaacaaaacagaaagaaacaagcaagtgttgctactatatcgcaatctcagcaactcaattgatttgttctggaaaaaaatcgagaagtttgcgtgggaacatttgaagagggatttacagcaagaacttataaagaagaagaagcaaaacctcgacaagttcatacaagatgcaattaaggtttcaattagtgaccaggacagatatatacttgacaaaaagattaaaactggctcaacccataaccataccacacaaaattttaatcaagtggataaccaaaatcgcacaccaacgccaaaaaataaaacccaacaacaagataaggttgaatcttccaaggttggtgcgtctcaagacgaggaccaggttgaggatgagtatgtagttaataaggacgaggaacgtatggagctggatgatttgaagttggaagatgagatggactctgataaggaagagaatgaattgaatgacttacaaaaagaagctgaaatgccattggaagaacttcttaagatgtaccaaaatcaacctgactataggcaatctgaagaagctgatgatgatgaaattgaagaagtcactgactcagatgaacctgaccatgtatctgatatttctatgcccgatgaatctccaccccccaatgctgataaatctgacgtttcaagggttgataatgttgattcttccaaggttggtgcgtctcaagacgaggaccaggttgaggatgagtatgtagttaataaggacgaggaacgtatggagctggatgatttgaagttggaagatgagatggactctgataaggaagagaatgaattgaatgacttacaaaaagaagctgaaatgccattggaagaacttcttaagatgtaccaaaatcaagcagatgaagttgattatgacccagtaccaaaaaagagccataaatatacaaatgattacatcggcactgatgggaccagagaagatactaaagccgataaaactcaaagggaggaaccatcttccaaaagtaggatggagaccgtaacaccttctgaaaaaattggaacagaggaacaaaaagattgggaaaatcatgtagatgaagaggaagatggcgtagatatcgaagtaccatttctaataaaaggagttttaagaccatatcaaaaggaaggtttgagatggttagtatcgctctatgaacggaacattaacggaatactggcagatgaaatgggactggggaaaacgctacagacgatctgtttgttggcgtatttggcatgcaacaaggggaattggggtccacatataattgttgtaccaacgagcatactgctgaactgggtgatggagtttaacaagttttgcccaggtttcaaaattctagcatattatggaacaccggcagaaagatcgaaaaagagaacagggtggaataaaccacactccttcaatgtattaatcacctcgtacagtattgtggtccaggattcgtatgtattaaagaggagagcatgggaatatatgatacttgacgaggcccaaaacattaaaaacttcacttcaaagcgttggcaaacgttattgacatttaatacaaaatatagactattattgacaggttagtaggttattttataaaatacatttgaatacatgatattgactttttaggaacaccgctgcaaaactcactgcaggaattgtggtctttgatgcatttcatactcccaaatatattcacatcccatacacaatttaatatttggttcacagatccacttaaccaggccttggataacatgtacagcaataacccgctttttacagacacggaacttgacaagaagaacaaggaaagagaagaaatgaacaaaaataacatggaacttgttgaaaaactccatgcaatattcagaccgtacctcttgagaagattgaaaaaggatgtggagaagcaaatgccctcaaaatacgaacatgtgctcaagtgtacactgaccaaacgacagcaagttctttatgacgagtacattcacctatacaacttttcttcaaataaggaaggcagtaaagatgagaggctgagttacagaagtatgctcaacattctgatacagctgaggaaaatatgtaatcatccagaccagctcaagtcacgcgatgttcaaatcccaatagaatttaatattaatacactccagctgccctacctctttcaaatcagtgatgccctgaaacataatttcgataatcgcaaccgtaccagtaaggttaataatggtaacaaggcttcctcagaagtgggttctaaaagacaaaggacagaaagactgatagttgataagtcatttaagaagagaaaactggctctgaattctgaacttagttaccttgccctagataagttattgtctagtagagttgagaataacaataggcatgctctgaatcaaaatttggtaactgatgtaaattctgagaaagccaaaccctataaccactataacggatatggtctaaatagtgaaaagttgaaggctgaaccacctaagaatcctgaagcgccgaagagaattatgataaatgagttgtcaagagaacagttattgcaggggcaaaagataaatctaggaccaatgaaggataagttcacaccaagaaaattctcaccgagtaaaagaccgcttgatgaactcactaataagtttttgagtgaaaagctgttgaatagagaagatagcatatttaacttcaacttgaggaacaaactggagataaataggataatagagtcgtatctgatactgattttaaattttttggtaatatcggtcaaggtagttagcaggccagtgaaattatatttttccggtacccaaggaattaactacaataataaaaacgactggtacatgaacgaagttaaaactaagctcctgaaaagagatgacaaggattactataagaagaatagagtcacagttgaggcagttaactctaattataaactacttttcccctctaaacgttcaatcaatgacgattgtgggaaattcaaggtactggggcctttactcctgaaattgaaatctgaagaacataggtgcattatttacactcagttctcaaaaatgctagatattctggaaaactggatcaacttcatgggcttcacatacatcaggctagatggttcaacgaaggtatttgttgcacatagttacatttattatcacggatttatgatgatgtttagattgatatgaggcagaagataataaacaggttcaatgaaaacactaagattttccttttcattagctccacaagaacgggtggagttgggattacactgacaggagccgacactgttatcttctacgatactgactggaatccagctatagaccgccaagctatggataggttcaaatataattatttataaattttcatacataactatttaatttatatatattatacaaattatatacaaacctatgtttacccaactgtaatttcttcaggtgtcacagaattggtcaaaccaaggacgtgaatgtgtacagattaattactgaacatacagttgaggagaacatatggagaaagcagttgcaaaagagaaaattggatgacttgattgtggatcaaggacaattcgacattcagcacaacaactggttttcaaacctggacaccttgataaacatattccaggtaaatctaaaattgtaaatagcttttagaacaagagagatgagggagatgaagaggatatttacgggaagaagatactccatgaaagtaacgtggatgagacacaatttcagacaaaaggtgtccagaacatcaagatgctcattgaagttgaggatgcagacgattcaatggccttgaaaaaactcaagaaggagaatgaaaatataaataaacaggttaggactctgaatttatgtgtttttaggatttcgaatcggatattataaacagcatccctggactggtcagttactgcattcaattcttactcaaataccaaactgtggctttggaaaggcaagttgagaacatgaagttgaagatacaaatcgaggactatcagaatcagcaaaacaatgaacaggaggaagatgaagaagatatatacacagactacacaagttctgaaaacgaagaactatctcaagaggatgaactgtcagaagattcacagtaatcgctacttaatatacttgttgattaaattcttgtaatatacagcactttcattagggtcctaagacactattagtaaccttaaacttacatcagtatcagtaattgctctagatattggtacaattaagcctcccttattcttgtttaaccctaaacatcgtgtttgtaagtgatagtatgttttaccgtattttagtgtttgttctaggtctccgccctgcgatcctacacctggcaccaagagataacattcatagttttccctaatcctcttaatctcttcaacacaatttgagccgacaacatagccaaacttgcaattacaattattattctctattacatatcattaaagagttaatatcaagttaaccaataattaatcttatgttaactgtaattgttaatagccaatatcctgataactggtaataaataattaaatgatagttaataaagtgttttaaacctaagaatttttcagattgatgaataacacgtaaatatagaggagtgccgtcctttaaaagagcagattggaactctttagacgactcgttggagcatttagcgaggatgaaaaggtcatttacaaaattgccagaagagtcagaacagaaagatttgagtacgtcagagccaagaaatgtgtttaaagtgcaagaatctgctttaagttcgtcaaacacaaatttcttgtagtattcggtggtcgtgccaatgtcacccagtttacagtctagcaatacggggatatttaattctcgtaaatatttacacaactctaccaaaacctgtaaatcgttattattctgagatatattaaatatttaaagagattgagtaatagaagtaacttttaggtgtagaagtaattaagaattataaaataatcttttaaaaataaaaatagaaagtatattaaagtggaattgtaggaatcctaaatataacttttaacctgaactccatcagctaatctgggtaagaaaaaggctaaattaggctttacacagcaaacatgctctagtgtgttgctgaaaatgtgtaagcagtacagtttaagcttaacataagtagagtccttatcagttttatataaatttacatttccctctatattaagttggaataatctttcaaattcctcggtttttgaaaatttatccacttgctcggctctagggtccaagcctaggcaaagaatcgtagattttgatctgattctggcctctaacttctcaaagaaacccattcaaataaataaaagtgtatttggaaataattaaaaattacaagtttgaaattagtgagtctatggaggataagtccacgcacaaccacttcgaccttgaatttggtataaacatttgttcaagaatctcgggcgagttgtggtaaatctcagaaaaatcagttccataactccttttctgaggtttaaagccattatttacaacatttaagttgtggtaggtgtaattctcatctttaaagctgttatttacaccatttaagttgtggtaggtgtaattctcatctttaaagctgttattatccgacgaacggaagctcggtgttaattctggagtatcaaacaagaggtgttgattgtgctgtaaccacttcttattcggtgtttcctcacaattaaggattttgagagaaagtttacccgttccaggtatagttggtgtttcaaatgatctagtgggcttttctagtcttagttcacacttgtgtatctcatagttgtttgtaaaaactcgatcccgaccaactgggatatgaaacttgtcattatctgaaattactgaaaatgtgtaatttactctctggcccatagtcagcatagtcctaggggcaaaaccggtaaaactaatcaatgaatagtttttccatgtgtttaagacctcagtgttcacatcctcgattagcaaatttgaaagcctgtcattggttaaaataattgtattcttatcacttttcttaaactgagcattgttaatattttttaaacagtaatcaatatggcaatggtaggagttttgaacactagtctgcttcatgtactgatcaaacaacttaatctcatcctctgtaaacttaacaatcccagccagtagaaaatagttgtcgtcataagaataactattagttagatatatggatctgttctcatgaagtttggcaaaaaaatcataatttggtctatccgttttctccaagtggtacaatagtttcttgtagcacctcacaggtaacacgatgagcgggttctcacctgaggattcgaaaaaattaagtgcgtccttcaacttggtgtaatccaatattcttgttttgttcctgtaataaccaacattttgtccgtcaataatgcaggtgtaagggtttccatcgactgacgctttgagtaaaaacgtgtagaactcaaatagtgggaaaaactccctaactgaagtattaaaaatggactttatcatcttcgagaatatctcgaaccgatctgagtctgaaatgtcctgaaactgaattttaaatttgcaaaagtcgcaggagccaaatggtactggtgaattgccagaactcactgaaacaattctgaacagtccaggtgccaaatccctgtagttcttctcaagaatacctgcaaactcatcggttatgttaaaagcgtgtaaattgctcttttcatacaactccaaaccttgtttaatccatttcttcaactcagagaataacttcgcgtttaatccgttttgttcattttttaaggctttaaatctgtgtgccagcgagactagaaattgcaccaagtaaagcccatttatcttcctatttaacctttcagacatgtattttattatgtaaaaaatagattcatagtccttcctacggaaaaagttttcaataatcagggagaaattcctgttccgtcccaggttaaccttgttggtgtattcaattaattcgaaggatttatcaatccttgcctttaaatctgttccataataatcatctctgaggtgtaatagtgttatcccttcaaaaaggagagttgttccctccaagcctaatgtagatcccactttatacaactctgggattggcaagttagtctcatgaaatgtaaccataaataaccccagggattttgacaagaattctaacatattgaacagtttttttcttactaattttgaaatatttggcttcaacaccctcctccaaagcttgggaatcctttgggaactgagtgggtcaaagtccgtcaaatattcgtacgtgaaagggaaaccatgtttaaagtgtttataattaagtggtttgataaggtgatgaggctcaattttatcaattttttcccccaattctatctttatttcccccagtttacttacataatccagttcaactggcggagtgaaaagttccgaaaccacatgtgaagcatttcctaagatgtcctttagttcgttatagaatatttcaggctgatttttatccactgaacttgagaacctaataagttctcctattagattagataaatagtcataatcaactgactcggttgttggcaccacctcagacttcactgcagtttcggttatccctgtagaaatggcatggttccttactctattatatgatacaggagtgtttataacactttttaagcttaatttattgtaattactgcatttgaaagaataaacaaaattgtttttggctccatggttgaggaatccattttcagaattgagatatgattctaaagctgtaaaaatccaaatccagtaaaagattttgaacatccataacatattaattcttcgaaaatgagattttttacatccatagcactaaaaatgtgaaaattcttagaatcctaaatgtgaactaaataatttaaatgtgtgttatggaatcttttataaaaaatgacgagatttttaaaataacattaagaatagtttatctttataagtttcatattaattacatcaaattgttagagaatccaagacaagagttattatacagagaattttataaattacaaaaataacaatttttaattaataataaatgcgaattttaaagttaacagacataaaattagtttaaatgatttataaaattataaaatgatttcaacataataatttcacaggtggttgaggttatgttgcacaattacacaagtttttacatttaaatcaaaatttttccttttgctcaaaaatttatataatttttaaatcaataaaaatgtcgtaaatacatatgtgtgtatgtattgtcataaaagtttgagattaatgtctatgtcctgtattgatacacggttaacgttctgacgttttccagtatccagtttaacaacctggaaattatacgttttcttatccactgttataggaatcactgaatttagggttaaagttgaatagtactttaatctgtcctccaaaatcttctttacatttttcaaatcataaaatcccttttccaaacactttaattctacattcatacaatcacttaactttactggttccaccagtactatatcatacggcctaaaaattaattattttttctcctaagctatatgtagttagtataatgttaatacttgatcttgaggttgtttataatccatttgggtaaataaatgtaattttcatcggttctaaattcaattgcagaacatgaaatacactcctcgggaattttatctaaaaattattataacaatttcactaactttgcgatatatagtcttcattattactttttatcgtacactcagtggcttcgtctttattatttaatttgataaaatccttctttgaacctttggtagtcatatcgttggttcttgctggctcactaacttcttgtgggttgtgaatctttcgtacaagtagttgaaatggaacattgtaatctccgtccttaagtgactcgaagaaggagggaggtagtaggaccttgtcgtggtcagagaagtttatttcactcccatcatcgctgtagtttatgttattacagcgtttgaacagttcactttgttccaaagctaacaatagtcttgcaggtttattgatacttccattcacatcctcaacatataattccttctacaatttatgttcaaaaagtacttataaaatgaataatatttttactagtagatacatatgaatatgattagagtaatagaaggactcacttttgctctgttgtaggactcagttgacacattcacaagtttatctaccaatttacccaaaagttcagtgggactttttattgaaattgagtattttaaccttccattatttattttaatggtttctagtctatttaaactgaatagtattacacataattgtaatatgtgtaagagcctttgcataataaaaattattatacatgtactgtaaatttggaaggaatctaaaataaaaggaataaattaacatttagttttacatttgttttaccctacgaactaaagaataaggttaatagctaactaaacattagtatatacagtatgttgtagtgacaaaagttagtgttggaatttttgtaattttctcttttaaattgtttttttcactcaaatgagaatctgatatttactaaattatacttatacctactaatttgtttttatatattatcaaaacccttcttgataatcttgtaatttgtacatttgttgatttacctttaaaatcgaagtttaactcaatgtaaatatatgattattttaatacacagatgactagggtggaattatctagaaggctcaaggttcgctcctacttgaagtgtttgttctttgtgcttgggatctatgtttgttttttatccttcgggtactttttggagaaacttcttaagtttaattatgaagagaatcgcatttatagttttcctatttttatagttgtaattaccactttttcaaacctgataatgagctctaccttgctcctggttcaacataacaaaaccacggtcctatctagccgtaaatcgcatccaaatttaaagaatccggccaaattatccggtagttttgatgaatctggtaaaatggcctcaactccagatttgaccgagaaattggaggtcagatcttctttgttttcagtgcttgaaaagaagcacctagttaagctttcaatctcctcctcattttgcgttttagctcaaatgacttctacctacgcacttcctcgtgtaggtactcccacgcaggtggttatcaagagctccaaaatggttccgattctgattggaggctttcttctgtttaggaagaagtacgcctggtacgacgtcagctgtgttttttgtgtaactttatctctcatcttgttcaactttgaccactttgtaaactataaaagtaacaagacttcagtttttggcattttcatgtgcttcctctcactagtttgtgacgcttttgtcggccctatccaggatgacgttctttcaaaagtagatgtgcatcctcacgtcctaatgttcatcacaaacctagtttctctgcctcttgcattccttgtttctttcctaactgagggtcttgatcctttctacatcctctttaagcacagacatattttgagacttgtgttctttctggccgtttctggtagtttgggccaactttttgtatttctatgtatcaagacctatggtagtttatacactggcatcattacaactctcaggaaagccttcacaactctcctatctgtctacattttcaagcataaaatgacccaccttcagtggttttctctcattctaaccttttctagcatcttctttcaacagtttttcaaaaacaaatcaaagaaatttaaaaccaaatgacattcagttcacacatctaatatgctatactataaactatatatgggtaccataatatgcactatgtattatatatattatgtaatatacactatacattagtgtagatcacgtattatagtgtatatactgagtagtatgttaatataatattaattcagggttctaaaaaaaatgaatatcttattaggtacgatttaataaacgtgcgattgccgctgaaatatcaccgttggtttggaccagagcttggagatttgcggcttggtcggtgaatcccatctcctggagtgattgtagctgtgtgctgaaacgctcctcgggtggtctggtatccactggggttgtcgggaatggcattgttcccggcatttgaaaatttgcaaaggggttctccgctaagtcacaattaaaacaggtaagcttactggttgttgggtttggagttgcggtgttggtatttccttggttattcatgtttgtctgctgcattgcttggtgcatctgaagcccagcctgtaacattcctggcctcatcaaagtcctcaacaactctggattattcaacatttgtccaaacatcgggttttgttgctattaacacattattagatagtatatagttagtattatatagttggataaatgcgtaagttaagtaaataattgtgtaggaaaggtaccaccattggttgtagaagaggcgaagactctacaagtgttctgaatagttcaggattagagctaatttgagttagcatttcctgaactactggagaattaagaagtgcagctgcgctctgcggattcagttctggcattcctggtatatttcccattccacctaaattccaatattatactataatcataacatagttatggcgttataatagtactgatattaatataaaaccttgaaacatttgtgacataaaatcttgattgaatcctggtacttgaccgaacggctgattttcgcctaaagaaaaataaaattaatttaaagtacctgtggtgggcgttgttgtattttgagtagtagcggtgggggctgttggcgttgcagttggaggagcagaagaggctggcttaaggccacttctaaccaggtgaatggtgttcccatcctcaacatttaaagcacttagaacttcttcatcctttataatacgacctacaagaaattaaaagactaaggtgtacctttaaagattagtcgctgtttatccgcaggggcgtttgctttatcagaacacctctccttaagctgtaaaactgtcatctcaggctcaacctcaagagtgaacgcttctccgccactcaccttcacagtaatattcagacccatatcatacaacaagtatatcaaaaacaagtattatgaacagttcaaataaaacaattatagtaatgataataagggcaacacttcaaggacagaaaaatcagattttaaagaaattgtaaaaaaatgaatagataaaaaaataaaacagaataattaaaaataaaagttgagaataatttaacttaaagttatgcaaatcaaaagggccaaattaaggtaaatgtctccgagtactgaggttaagatgattgtacaaggtaacaaatgtacttctagggaaaataaagcttcaggcagcttgaattgttggaaaagtagttcaaaattagaaatatggaaaatggttatgataaaaacaacagctaattgatggggatcatttccacatagataattaaaatttctagatttcattccattcagaataaatttaccattttgtcactattattatgcttttcaagtaatttttagaattttttgcccattcgattccattcttattcctcgttactttcaatttaccattctttgatacaccacttcactttaaactcaacttattcttggatttcatgcacatatttacctacacatttaactcataaaattgtttaatgatatttaaatgatcttatttgacaaaatcccctagttaaataaacaattgtttaaaattttgttatcattgatttgtagagattcctttcctgtaagcttgttttgccttcctaaaactattatttttcatttatttgttacaatttgctttatcctctccagctccttctttgcatactccgaattttcatccaattgtaatattttcatcaaaatctacagaaattacaaacaattgttacttaataaattagccgatgaataatttaaataggttaattacagatcttgcttcatttaatttacaaagtgccataaatgacatcgccttcctagttaacgccttcaagttatctggataatcagatagaacctaatttatcagtattatacgaaaatttattagaaatgtgtataaaagtacttcattgcaatgttttattgagtcgttgaaattatttaatttataatttacaattgccatgttcaagtttgtgcttaatttaacatcttcaaactttttcaaaaactcttcgtcctcgggaaatgcgtagtcaagctgtatcataacctaaacaacccatctgaaatcataatttttatacctttttatacatagataaagaagatttataatcgccacttttaaataattcatttccctcggatttcagactattaacatatttattccagtattcatttaaataactgataaatcaataactaaattaagattaaaatagtatgaaaacagttacgctaaacaacaattgtattgttcttgcattggtctttcaaatagaatcttctcctacacattggtttatataatttaagaaatgtaaaaacaaattaaaaataaactggcttagtgtgtaaaagatgattataccttagaatggtcgtgaaaatgtaaaccttcaacttcaaaattacaccttccctacaaactggtataaaacagataataaataacagatacactagtgagaaatttaaaaaaattaaatgcctcaagtgaagttttcatactaatcccgcttccaatctagaggtatagggataaacaatcccttcgtatccaagcctgataaaaaatcaatatccactccggttgacatgttgttttgaacttcttccttactattattagaggggttttcatcattttgtaaatcttttcccatgttgttattacaattcttattttccacattaggagaattgttatcagtgttatgacaattatttcccaaattatctggaggattttgagtattttgagtattttgagtactattgactgtatcggtggtgttattgctgatttgaggattttgggtacaattaacaggggtatgagaattgttggtttgtattgaaaaattaaaattagagtttgactttgagatattttcgacttttggttctggagacccaaatttatcctcagttagagtaggggagcgcttgttagtgctcggtccgtttgatttgatccagttccgccttatggttggaagtgtaagctggtccatgttatcaatcatgttcctaaactcaactgctgcgtagtaagcctccttaactcctccaaaaatcgcaggtgtaaaagtttttgtatgttttacactattctcatcataatacaacgtacgccatcttgatatactcggaacccagtttacccctaatgaattattatgtccattcatacacatcatatactctatttataactaaattatacttaaataattccaattaataataaaataaaaaacaagaataagaatgaaagtaggtaaaattttgtaatattgtaagaacatacattggtgccatggttttagggattccgcaatttttttgggatcattttgttcctcaagtgataaaacatgtttgttgttggttcttgaggagaatagaagagcttcatatcccttatcctccaagttttcggtgtcaatctcattgatcataaaacgcttaatatttttaatgttcttgagctcgagatccgaaaccttgatcttcttatggcgtaagtcataaaatgagtcatagtccaagttgcccatgtcatctggaccaactctagctttattttctctaatttctggcactgacctgggaacaccataagtccctgtggaaggccttcccatggcctcaggtgaatggcctccagaactctgcgtcacaggtgggaaatcaaacaccgacgacgcaatgctcgtgaagaggtgtgaaacagcctttagccaggcgtttttgagtccgtacctctttgcgctaaatgagctttcctcagagtacttgcagtatcgaggtggaatacgggacttaaaacatttaaattccggctcataaacgatcccttcaattttcggtaactcatccaataatctctcaactttattcgttgtccagctactctcactcaaacactccctgtcctcctgaactctcttgataccctcactccctgctacttgtcgtccaatactctggttcatactttctaaatgtcgtctgaccagttcctctatcttcattcgattcaatatctcatcatctataatccattaatcaacctttaaacatacgttctagctatagttcttaatagtatattaattgtacttaactatatatacagtatataaaatttagataatttatataaaaaatactgttagtggaatcgtgagcttcatcaatcccgttgttagtgttgatagtgagaagattacaaagtgagttgaattctatattcgagcaggtactactggttgaggtggacgctgaatccttgtcgtctcccgcggtgacattttgttcctgtatctgtgagtttacggggcagtttttatcctcttttgtagatccaccctgttccggtgctggatctaatgaaggatctggtccggaactttgctgaccactttctgaaccaaatgcaagatcttcccctagtataaaatcactaatatcttcttcgtgtatttctaagtcatctatggcttctttgcttagatctagccctgtcgcctgaaaataatttgctggcattaagcgcttaccattctgggaaagcataattttcgttgattaaagaaccgctaacacaccagaacgtggtataaaataataaaagggggaaattttttctacttttaaaaaaatagaacagtattcaaacgtcaaattgtaaaacttaatatgcttaaataataatttcatccaggaaattgattctcaaaaatgatatttgaccccgcggtagcatgataaatatcccgattattcagtgaatagatctttatttcctggcctggtcagattttttatccttccagatgcttttttaataaaaactttccagatcttcaagattttaaatgtttcactttatcatgcaatttccatgtgcaaagatgcatcctcccatatccgttgctgtgcccccgaatccctccatttcttccaaaaaaataatcaaaccactttaatcattttgattttagtgatttttattagatcatttgtgtatttggaagattgaacagtttttgcccgaattatttttgggcatacttgtctaacttgtatggttcatctataaatataattttctaattaatacactttttacaaactattccagacattattttcattcaaaaattgtggaaaatttgcattttagttatatttaaatagatcttcattttatgctaattctttgcacacctatgatgccctctacttaatactgtttaagttaggaataaaatgggaaaaaagttaaaacccaattaaaaatatgcgaattacctacgaatttatagaaactaataagtatttatattaaccaatttatatatggatgccaactatataaaaagggtgaggaatagaaatacaagagtgccatataaaacatgtattgtcataacattatgcttaaatggaaattatcagcagttaaaaaaaagtccgaactttgaaaattctattgccaattctagtttcttttacaatttatcatttctaaccattagcttccaccaggtgttaagaattgagaatcggcattaaacatcaatcgacaattttaactataatagacagcgttaactacgatgaacagttaaggaacaaacaatagtaatacaaagggtttatcatgaacaaatgagtagaacaatgacagggtttcggttacatgacagtgcacgtgaggcatctgtaattgcgtcttctttgtttcttgtatgttttgaggaactcgagctgtctgcggttaattgcgccttttctgcggtcgcggacaaaacaaatggcatcaagtggctgcatgccgtactcaaccagtgcaatgcaggctaacacaggtgcgcgtcccaggcccgccacgcaatggactgctatggccgagttcgtctctaggcagtggtgaattaactcgagccagcgagtcacaatatcgtagggaggtgggtccccatcgttgaagaacagatcctttacttcgatttgattatccagcaacaactggtcattgtagtttgactcgcaggttctgaccagacagctcacaccaaactccaacatttcttttatgtataatttcaagttagaattgtttggcgcatccaaaatcaagatcttgagcttctggtactcgattcgagtaggcttattcaaaacacaactgtgagatgacatctctttatacgattccaatagctcttgttattatcaaattattctcattactatctataaaactctattacactataatttaactaatttttaaatacttaacataactaattatgactaaatgataacaaacaagagggtaatagttgataacttactttattaccaattagtagttggtaggagtaatattagtgaaaaaatgagttggtagaaatccaaatgatttactggaaacctatagtagcacatgaaataaactttcggtctttcctagtccccttttaatcttctttacatggttatttgtattacatttatcaataatatcagccgatattcgacaaaatcaagtcaaatattaatcagaagggggattttttggaaaaatgagactacagtgatatcaagagtagtaaagagaattttactgtaagatgaacaatgctggtaaaaaactcttgctttatgatgaacaaagttgaaattagaaaaaataatgaacatatatattacaaaacactcgattgatgcgactctgctggccgcaattaaagtgatcacatctctgggcaaatatcaaaaagttaattaacaagtgatcaaattcccgataatttaatacataggatgaaaaaattattagctgatggaagtggagagacaaataattaaaaaaataatttttaaaaaatagttgaaactacataaaaattatagatgaactaacctttgtatgtttatcaatttttaaagattgaggagtactcgtgaaaattagaccttaaaggggagaaagtacaccaggttataaatgaaacagaaaggatgaaacaggttgaatgattaatgtactgaaaatatcttttaaaaatgctttggtcatatgatagatccttttaggtttgtggtgccggtcgacataaaatccaattagtcgtacactagctcttacttttccatttacttctaaaaacctttgattttgatttctaacaatttgaatgttaattataccagatttacaactaacttgccttattttattttctccaacaaccgcccttttactacattttcacatctctacattttacactatgtttattttattcttttattatttatatttttcatcatttcttccattaatatatccacagtattttatttttacttaattatttcctgagtattttccatctttgttcacatcgactcttatgcgttgtttttaaatagtttaaatttacatgattttattaattttccaataaattaattatatattcttggaatcttccatttataaaatttctggaaatgagtaatgtgtataaatttaaatttaatgtccgtggtaaggtccaaggtgtttttttcagaaagtacacaaagcttgaggctgacaagttaggcatcaagggctacgtcaggaacgaagaggacggaagtgtctctggtgagggccaaactgacgacgaggctaaaatgaaccaatttaagcactttttagagtctgttggctctccaaattcagaaattgaatcctgttcgttcactctcgacagcagttccgcttcaagttatgattccttcaacattttatactaatctacgacacaccatagcatacaatgtgttatttatcatgtacattaatacataatttaatgtttggaaagatatgaataatccgatatatcaataagataattacttatatatatcgtacaatattattaagttgaaagtgattggagtaacttggtgaagttgtcgtttccaggctttctgttaataaaattaacgtaaatcttcctcagcgtgtcagttgttttgtacccctgggacttcgaaattatcttataagttatcttcaaatcttcaacatccactatcgatattctaagactttattatattagtatatacgataataattactatactaaaagaattgtagtgaatgtaaggagagtatttacttgaggattttgtgtttaaaattatcgtttgatttaccgattaatacattatcgtgtgtatatagattaccgcatttgttatatactttacaaattacttggttacacaagcaatatttactaaaaaacaattagtcacaattatgttaaatataaatataggtggaaatcgtataaactaaaatatagtaaaaatgaataaaaaatacttgatgttataatctttgtaacataaccaattgggattataacctcctacataagtggaattcttattcacaaatattatactatcagtttcatagtcgaattccttatttattatactattaacatcattaatactattatatgtagtatatatacagtacagtattgctagattaagaataaatcagttaacttgtacctttgatatgcgctgtttaattgatcaaaattaacttctgaatactttacaaattgaaataatatcttagaatcagtgttcaattcatccaatctacaacacaattcaatcatataaatataaaatcactatgttaatataatagatcatgttacattgaggctaggaagaataatctacattccaaatctgaagtggttaatatatgaccattaagcattaatatatcaattacatagtatacaatcgttacatctgggttatcagcgtttttgtccatgatattcggcaatttactgacaaacggggttggaataacacagtctaagatcgttggaccctttatatcagtactaaaaacatgcttaacgtaattttgtttattgtgtactgaggctgtgtggttgttaatgtgtatcaacacccttgaaccctccggtcttacaaagaacatactgccccttatctgattaatctcttcgttaatcaaactatccaaacaagttataaactcaggaaataccaatatttcactgattccaccagataacctcaataattgattcaattctaaaggctcacctaacttctttatattatcatttaactcagtaatattattaaactgaacaatatcatcatttaacggttcagattgatcgttgaaagtggtaggtagatggttagaaaaggtaatttcatcagtttgggtaaaagtggagaagaactccaaatcttgcaaatattttttacggcgtttctcgacaaactctaacttcaagtcttccaatgaacttattctagcccgctttttctcctccatattataaccaagtataatatcaaattataaccatatttataagtaataaagtgaggaatttagaaggaaataaaaaatgtgttaaacaacgtcgttgaaaaattgatactaaaaatgttaaaattaattttaaaaaataaaaagtaataaaaatgtgaaaaaacagatatggtacaaaaattataaataaatgatcaagaaatcccttataaatgtaacaatcaatattgggtgattattacggtatatttactaaaatgtatgatttctacagaatccctttacatgatattaaattttacccttggtatcttttgaatttagaatcctaaattaatagaaccggttgatttttgtaaaatttgtttctaaaaaatcttttggggagattatccctgaaacattttttctctaagattccagttggaatccttttcatagtctatttgtcatattggcatttgttttaatgattattttctttcattccagcctagtttgggctattcaatactggaattcctttaacattttaacgtaaaatttaaataataacaataaaaattgtataaagtttaatttattagagtttgagctaatttgtattcctttttttaatattctgtaaataagtttaatatccccaaatgaatgtattaattgtaccataatatgaacgaaaataactttaagaagactttttcatttcctgttatgtttaagaagtccgataagaaggcttcaggattaattcagacgaacggcgactacctagatcactgggagcccattcgcatttttgtgggcacttggaacatgggctttaaaaagattgaccctaagcagttttccaacgacgtttcgtgctcctgtcacacctatgtgtctgagaaatacgattgtatgagttgcaaggctcgttatgttgaccctttgagtgagtggattaagcttgactacgacgtgtactttataacgcttcaggagtgtgtttcatttaacttttttgaggttgtaacccgctttttggagaagtgtagacatccgatggaacgggtttcatttaaaactgaccgtattctgggcttcggagaaggcgctgtggttaacagaaagatgacttgtattgcagcctgggtcaggaaagaccttctggctaatggcgttgtaagggtttgtgcttcaaaggctctttacctttcagcctataacaggagtaaaggggtagtttgccttcaaattaaggcatttggccaaatcatcctcctactaggggggcatttaccaacagattacatggaaaggcaaaaatcatttcaaacaattctctcaaagttgacatacttgtttggggcaaacgagaaactcatgtttacggacctttttcatcacattatctgggccggagatttcaattttaaacttaccattccaatggaacgtgttgttactaatattgttgatggcacacttgataaattaatcaagtttgatgaattccatttatccacatcaccacttaaggaccaggtatccgttacattgcagtctatttcctccataacctacctatttactcttattctacctattatatagtatatacccagggaataatgttttttatagaaattctgtgaggatgtgataaaatttgacccaacttataaaaaacgagagaacagagaagtgctggacaagggaagaaagaactggtttgaaatggagtactcaacctcagactcgaagtggtacagcttaaacacagaacgagtgccttcgtggactgacagggtgctaaaatggtccgataaaacaatggaaacctgtttaatttttgaaccaacgagttatagaactgcgattccaaagaataaaacgcccttactaatcagtgatcactcaccagtctcctgcgctttcatcctcagacccctaagcagaaatatcgcaataccaatcaagctaaatgcacacacttttaaatttgattaattttctcagacaaaactacttactaaagtattttatactgttcatgttattctagctgtttgatttcatatagttaagtgttaaatgatgtttaaaataggataattaaaaataaaataagggaaactagtctaaaagatttttcagatggaaaaaattgtgataaaaaattggctcgaggaggttcgagatcgttggaaatttctttcaaaggttgaaatatgtgaaaaacactaaacattagtaaatcttttataattaaccaaaagagattaatttattttaatttttaataaaaaactgaaaatttgataatcaaattaaagttagagattaggtaaaataaaattttacaatttaatataatggaaataaattgaaaatattaagtaaaatgaagcttatacctgtattaatatttgtatcaataaaattggcgtttagcaccaactcgattttgtttggacccggatatccaagtagatttgcatgcgtctcagatgcgtactcacttgagtcttcactttacaagttaccgaaggagtttgtagataagtataataaagttgcactcgacgtttctagagttgtggagctcccagaggaggttggaattgacagagaattagttgaaagtggtctaactttgttcgacgaaagcaaggttcttagaaatggtttggtatatacctcaattgagtacagtctccaacgacatattgccagggattatgtctcctcacaaatggtactcgcctcactcaatggtttgaagacaatttcgtacatcagcaacgttctcagagcattcgcaaggtctaacataaccaaatacaatacaaaactgacagacgaggccaagtatggactttgctcggcttttgtttacggcgatgttgcagatgctttggacgattacagaaccaaacagctccagaaaataagggcagaaaacaagagaatcactcataacatcagtcaactgggaagagtcaagagcactggaaacatgtggctgctcactggaagtgccatggttaactgtatcaacacactgttcgtaatcatgtcaatgatcgccatttcaatgatttaaaaataaatctttttaatttttatttttatgtgctatatacttttttacttaaccctttaaatatatttattgatatataaataagagtgaaataaggccttggaatacataaattaatgataaattaactatatataattgtaaagatatagataatgaataaaataaatgctaagttgtgtaatttataaaaaattttgccttgaactaatatatggcattactataatcatagtataatgggaacatacgtctccttttaagatctggttaaaatcgtgtattgtaggcttgaaaatccattagcttgatttattaatgtaaaataacggtataaaccagttaaaatgggttaaagccgacttcatgtaccaaatttcggtatcaaagtcggaagaattttttcctaccaaattctttagaaaatcatgtgtgatcaaaagttagattaaattaagatttacaataaaaaatatataaatatgaatttgattttagtattttttacgttagttgctagtttagcggcgtgcaacaaatactacaacgacatggtgtcattgtcgaattttggatactacaactcatttgaggacagcattgagtacgtaaggcaacttgatttgcttgtaaacaaatacttacaggtgttgaagaaaattgataatgacatgtctgtagagcttagagaggcttcaaattatgatttaaagtcggtcagcgatggcactaacaaaactggagctgatgtcataaacaagatgcacgctcgacaaataatcttggacttgatgatgtaccaagttcaatatgcctatcaaatgtacctcagcgcctgcaacaagtataggggagaaacagtgaacgctttgtttgaggacttgaccttcagccacccaatcaaccgtatggttatctatgagtgggtcaggcagatggatatcaatgtcagaagaatcgcaagtttcgacgatacaatatcagatatctggaaggatgttagggaagagatcaacactaaccctgtccaagatgttgacttgccaaaaacttcagaagacgccaagcctgctgaagctacacctgaacaaaaacctgaacaaaaacctgaggcaacgccggcggaaccagccactcaagcaccagctgcgtgatcaactgacaaaattacaatacatgcaatcaattcaacatggaaataagaataaattaagctgaattaagtgtaaataaaggcaaaattaatccccaaatgaccaattatagtcaaattaatggctagttataaccgaaatatagtaaaataaagctaatttaagggtaaaacgaagaaaattttgtaataaaattatggtagaaattgttctaaaattgaaacaataagatagcaggactcgtagaagtaattgactttttgcctcagagctcgaggcgttatcgcttgaattgagctaaatttaattaatttttaagaaaacttacacatttagaatattttggtccttttgatatactacacaagattggtcagttttaagatcaggttctgattccaacacattcaacgttatttcacaaaatttattattaggaaatgttatagcaatttcactaaaacatgatttatccaccaattgttataagtaatttatacaaaccagtatatacagttatctaccagtatttaaattaatataaaagaatcttactgtgtacatgttatatctgttttattcataatatatacaatatgcaatattaaaattaaaaagtctaaaagaatctaagtgttgatcaccataacgtcttctttaattttttcatttttttaatggaatctggatcccaagagccagtaatgtccctacaaagattctggcgttttttatttttaccttttaaaattttgaaaccaaatatacaaaagtggcaacaataccgttaaacacaagattctacacattatcacaacatcggttcattgtagttctaaccatgccataggactatctaattaactgtataattaattgattaccctgctaaataaaaaactgtatagtaaaattttaatgtgaagcaagttgtaattgtaattataacggtaaatccataaatcagtaggttattcccagtatcctaaagagtaataatgtttaatttgatgtacttggatatataatttgatcctcggaaatagagaaaatgatctgaaaaatgaattatcaactagacatcattacattattgaaaattgtataaatcctgaagcctaaaattatattaatttatcatcaaatgtataaattgaggtataactaatgtatgtgtaagaagagtatactattctggaatcatctaatcttgacgctagtagaattgatagtaacagcaagcaattcattggaattacatcttcctctctcatgtattcatgcttcactgatctgatggaaattttaatcctaaaacttactcgagatcataattctgcgataacacatgaaatatcgatattactacacattactcagttattgcatagtaattatagtatgtaactactatccgtaatagcccttataaagggtatcatatggtaattagatattgagagtacgtagtgctagaaagtaaacggtatcatcgctgaatgatgagattagagtttgtaaaactccttgaaagagctgaaaattgtgttactactgagataaatcaacctctaaggtgaaatacataatgaaaaacatcctcaaatgagttatgtactctaaagcagagtgaaacagtattttttacctgttttcggagccttgtttagtaacattaaaattaaaaataccaatattgatattaatattagaacataaattaacctaacaattattaacaaccaacgtgaaagaattaatattataatataataattaatggtaaacagtacgatagttgaattttattgtttttcattaggaaatatagttttgagagcattattattgtactaatatgatcagtcactacaagcatattcctgagcaagtccctcaacttcagttttttaaagcctataaccatgaagaaaataaataaactaaaaagtttctaagtctaggggtaactagagtaaaatgtgtaaaactaagttctctggggaaatcgcactgtgttacacacctttaaaccttaaatcgtataaaaaagaatcgtctacatagttaggaggataaccttgatcttcatataagatcatacgccaccttttaggtgacttctctaccattatctgtatcttaagctgaccctttcacccaggcgtcttctttttcttcttaacgccaatcttacggttttattcttgcaattatatgtcaaggttggcgggatgagtgaaagagggttagaagagcccaaatttagcaaattttgaagattataataattttgataaaaaattaaattctctgtaaaactagtaactttttttatcaaaaacattttctaataacaatgcctcattttacacaatatatacaaaaatggtaaattgtgaaaaaattaaaaatgtgtatttttgtgatgttttaaattccccggttcataagtaatatttgtttgaatgaccttagagtccagagaatcaggctcctataattaaaatgagagaatctcagttacttcgtagttcctaatcctcgaccttctctttggtattatttgtaaaaacccatctggtgttctttccattctcaaatactcctgactgtctgacatctccacattcctgtcacacatcctacacgttacattattatacgtattagtgcatatagctaatgtaaaactatgtaaataactgtgaaactaagtcccatggacggtataaatcaattgtaaacaaaggagtactttggaagggtttgcgttttcttaagaattcctctcttccttaaaaattcaacttttttagcagccttggccctggaaaatgatataaaaaaggtttccatacctcaaatagaatttcttcataattttcttattctttggtgataaaatgtttttcttactcgttaacttgatcttccttttaccaacttttatgctacagaatgttataatattgagttatatgtgtttaccttgtaacggtaggtttaaggagtgatttctggtgtaatgaaagctttttggacagtttcggagttaaattgcgatactcaaacccgctcaaattgctcgacaaacttatcatctctttcaataatccaatattcttattattaaacaatatgtacattcctacacctcattacactaattgtgataacactacataataactatataatagtgtagtggttatagcggtccatcccgcattgtgtttaacgaactgttgtttgagttgtgagtgaaagaagtagtgtaatggatgaattgttgaatattgttggggaagttgaagaggattacgttattgattgtgcagttaaatttgaaccttgaagcgaagtttgtagtgatgagaatgtcagcttcggattcaaaactgcgcaaattctccgtacgttcctcataattcatacccccaaacaagttactaattttatatcctctgtccaacaatgaatacttcaaaaacctacacaaatttacttagtaataataaattttaggtaaattatagataaataagggtagtgaagcatacttgttgcaattgatggtatttgaaaagatgacaattttagttttttgtaagttgttgtgtgtgatttcattaattaagtcaattagaacttccaacctatcatttgaagatgtgtagacaaatattttcctaaaatggtccaagtcagcagcttcttccttctctaataaggttggagagcctaaggcgtttacatgctcagttagaacagacgatttaaaccttgaaacgtacaccaaatccaagttattattcaaaagtaaattatgtatctcattgattttaggcaagtacatctcctcaaccaataagtcagactcctcaaatatcataaacttgagatacttaacatccaatctcaagtcttcatactcgccatttataactctcaataacatctcaggcgtagttattaatacgtcaatgttacccaagtctataaacaatataacgccaactatttactatattaatatataatatagttaaaactaagtaaaaatgtataggtaagatagtaacagtaggtacctccagagtaagtcttagaacttttaggtaccaatttgtaaccgaaaccgccggtaattaatctcgatcgaatacccattttatcacaagttttgaggatattctgccctaactcgcgaaatggtactaatattatagctaaagggacagtaaaacaattagggtttaatcttggaattccatttatacgtcttgaacccgggggtttaggaagccttctgcccctcaaattactatataatatcattttgtgcctgtgattatccctatacatatagtaatatggagattgtgagttatttattaactcattcaaagctaacaaataggaactggttttcccgctattacttttaccaactacatataatacagagtttttgtcatttttgtcatttgaatcagtgttacttacatgtttaccagtttcggtacgagaactgtgtaaagaattttgggaatatccttgggatataatgtgctggaagatttgagattgaaaattgtcaaaatggttaaattttaatttatttattaaaaaccgtgatgttaaacttaaatcattgtttttaaccaaatcgcatgatttatatccaacattagggaaatttttatttttatccaagtcatcctgttgaacattattattactactaaatcttttgttaaaatagagaaagttagaagtcgttcgagagttaattccatcaatgatagggacacaggtgtgtttatttagatgaagaagcttgttggcgaatttagccaaaattacaaatgacatttattataacataatattcaacatagtagtagaattttaaaaaaataatgataaaataatcatatttgataaaatgtgtagtggtgttgaggaaaataaaattaaaataaaaaccttccaaaaatataaaatcaatattcacatatataattgtaatttctatacatgaatatgagtgtaattagtggttttaaagtattaaggaatttttagaaaattttcaaagcaattataacaatagtatatcaaaattataaaataatcttatattaaaattataaagaaatagcctaaataatagtaaattgatggtcaaataaggattaaacgaagttcaaggtaaattggagaatagtcgttatgtggtatgtttaattatatggtacaactggaaattgtaaaaattttcatatgtatttatatatttaaaatgagttgattcttgaatttttaggattttcaaattaaatcccattggtacctaatgagtctttaatttttagattttatcgaatccacttttatatccaaaccttcaaacatttttaacaatacccctattatacgtttcctacaatttaggaataattttaacataattttggaatattttaagtgtaaatttaggtacattttaataccagttaaatcgtaggtcgatgtgaacttgagtagattatatcgatttaaagtgaatttttaaaaaattgatgatcattttaatttgtatgatattataatggacggtgtttatattttgaggacttttacctcctggtacagtatcaccctttccacgggaagtgagcccactggtcaggataatggtgagatattttcagagtttaaggagtttgtaagtggatatggcactaaacagctttggattgaccgctcaacatgccaaattacagagtcggtgatacctttaactgaggaggatccagtggaacagaccccgataaatgccttcctgggcattgttgaagttttaaacacttaccatttggctgtagttgtccagtctgacctagtggctaatcttcatatgccggatttgacgcttggcaaggcggaaagaggaaatatctacagcataaaacaggtcagattcttcccaattaactcgactaattgcgtttatgcagtcaataataatttactgaacgtgaccaactttggaaatttaagcaattttagcagtatgggaaattttggcaatattggaaatctaggcaataacgttataacgggctccaacgaacaagttgaactaacatcggaggttaacaaagtcatagaaaatctggaaaaaatactatccactggttactactactcttttgacacggatttaacccgttctttacaaaacttacattcaaacaatttcgttccaatcagccgatccaacccaatacacaaaattaacacaaataacactgatgatgtcactaaggataaggataataatggaaatgagataatatacaatatgagtgatgatgaatataactggtgtcataatatgagtaagaatatgccaaagaggtgggtaacagtggtaatacagggtttcgtgggttacatttcaagtgaagttgacggagattttgtcgagattttactaattggtaggcgtaatgttaagagatcaggtacaaggtttgtcgccagaggtatagatgatcagggaaatactgctaattctgttgaaactgaaatgagaattcggattaattacaaaggtacttttcactcttggttacttagttttacacattgtactcatatatatcgaaatagtttttcacaatatactctattattattaactatatattgccgtactatttatacctaaatacttctattcgggtctataaaatgttttagattggtattcgtatgttcaatatagaggctcagttccattattttgggagcagttgaattttacagccccagtgaatttgtacaactatcacctgaactttgacgcattttcaaaacatgtagatcaactaaaagaaagatacaaaccactggaactagtactattcatcaaccttttggatatcaaagataatgaaagaatactcacaaactcgtttcaacacttagtacagcaatataatcggaatcatcgcgtcaagagtgacaatggagacaagagtagtggagataggagtgatagtgttaatggaagagtaaaattggtgatggagaattacaattacaacgttaatgcgaagtggtgtacaaatgacgttttaatcaattacattaacgaaaatttgttgacacatttaaacacaatttcatactttcacaatactgataatggtgagggcggaaagaaattggaacttcaaaagggaatagtcagaacaaactgcttagattgtttagaccgaactaatatattccaatacgttttatcgtggatcattttcaacaatgttctccaaaaccatatctcgcacaccagcaatattagtgacacagttaaaagttcggttgacactggtaacagcactgaaaccgcctctaataatggtaataatcctgaggatgtggttgaatttgagagtaatgatttgtttaacaagttcacgcaattgtggtgtgatcatggagattatataagtattcactattcaggaacgcagtcgactctatcagaaagagttaaacagagtaatacgagcattaactcactccttcactatggtaaaactatggtacaaagagtctatagttcagtctttcaggactcccaaaggcaacaaatttacgatattctaacttcatatacctataatggagttagaagagacccactaaaacgaagcttacttaacagtaaatactacatacaagatcctttcaatcaggacgattcaactcagaatgattctggccatagtgatcctgcccagagtgttggtgaggggctggaaaatccagaggatggattaaaagtagtggaggaaaacagtgaagaagatgaagaagttagtaacatattcgatcgcttgaatgacgaaattattagtaaactcacaagtaaacctaaaactccagagccggaaataccagattttaaacctgtcacaactagtattaaagataaagaatatagtgagaaggaaaggtttaaattagttggagatgatttgaaagtttggtatggtagttggaatattggggctcatgtggttgaggttgatgataatttactcaattggattgagttggacacgttggaatgtgatttatacatcttcagtttccaagaattcgtagaattaaacttcataaatatcgctactggtaagtaacggttctttccataaaccactgggcttagttccatctgggggattagctttatttttacacatacttacacaattacactagttattatacctagcttaccttactattggctaatggtgtaataacgtgtataggtagaagagatgagaataaggagtatgagtttgagaggttgatagagaatatgttttcgatctcaactgaccagaagtattacaaagtatcttcaatcgcaatgacgggactctacctggtcatctacgcaaaactgtcgctcaaaccctatatcaccaatgtgcttattaccaatgtcaaaacaggactcaatctcaatatcggtattactaaactaattacaaatatatattacactgtgttatatactattagatagtaacattgttagacactgttatatatgtttttttataggaaataaagggtgtgttggtatacgatttagaatatttgatcattatatgtcatttttgaacttacatctgaattttggtacgtttctcgcctattcctttacaaccacttacattttacagctaaatataccattaatttatctaactttataccccactactagttgttacacactaaataaatattggctttaggtaagaatttgaatatcggccgaatcgaattgattgattacatactaaagaactcttttaaggagtataataaaagcgtattggaggatgacgtgtttgttctgggaggagactttaactttcaaattcagttggagaaagatgttgttctgaagcatctgaaacgacttgagtttgcaaaactgttccactacgatgagtttaacatggcgaagatgattggaattccatcacttaagtaccttaacgagccaaagatacaatttttaccaacttataaatataaagatgggaccaaatattataccactaaaagatcacctgcatggtaatttttgccaacaactctagttattccccatttatttatcattaaattaccttaaattacatttatttatcattaaattaccttaaattatgactaatttaacctttgtcatacctatttttaccacaccattagttgttagtaatgttgggagtatgatgtctataggtgtgacaggataatatacggaggaaagttgaacgagaagaaaaaggttcacgtcctcaactataagaggaacgataacctaatcatgtcagaccacagaccaatctcatcaatcattctcattaatctattccaataattttatttcaaaatttgaattcttttcgtactaacatacacgtcacttactacagttaatacacactatatatgtatagtatattaatagttaaaagtattatatgagtcgagtaacgaagggttgttaaacagttcctaaacaggaattaaaaggataaatatgaaagtttacctgtaaaagcagcttaaagtgtaataaatcgacggtactacacatttcacgacatgaatgcattgcaagttgaggaaatccgacgtcagccactggtacgcaaagacgagaaccaagcatcgggcctacagtgctaccgcaaggagtctcatttccaaccctaaactcctgcaaaggtactcctgcagaagcagcagcagtacgaagcaaggatgaagcctgagtctcggtcgcgtaacggccgttgacattccacttgagaacgaccccgccgtggaactggggtgaatgagtagcaatgtgtttctcagagtagtttggatggactccgtgagccatatcagcgctaacgaccaaggccctgtcccgagtactcgtcaatgaaccgcccaaagctccaaacaatttctccagccatagaaaagtcacgttggaatcagcgccgtaactcaacgatgaaccgatttcttcataattgtagctcacagtgactaccacggcgtcgttatcctcacctacaacatttttatggagttaaatctatagagttatctaagcatatataaatttaaaactagtgttgagtgtgtaaggctgagccccagttggggaagaggaatcaccatgtgtaaaaatcaccagcattaaaataccttgattaagaacaaaatcggtgaaagcagaaatcgaaccaaaacaagatccaaggttatcaagtctaccactggagacaaattcttcataaactccagataaacaagaaggatttgagtccatcaaacataattcaaaatcaaccaaatcgtcaactttacaatccaactcactacaaacaccatgatatggtaattaaatattataatattaattattttatattaactatataaataagtttgttaaacagtgatacgatgagatgagtttgagcaatggttcagtttgtgttgagttaagattgtgaacaacttcagtactaattaaaggcttcaagtgattatcctacaatagattaaactactgtagatactaataaaatagttaaccatatttagaatgtgtaaagtatgtgtaaaatagtttccaggggtgagtatttaaagtaatagctataacgaactttgttgagttttagtgcttcacgttcagtggagttttgcaagtgaattgcaagatttggtagtaaaatcaatggtttttggacatgtagtagcttttcttctaatttgtctataaaataattccgttattatgttaataaaatacttttcgatttgacgataacttttcctgccaaaccaaggtcacgatccatccaagtatgccataatcctccaccataagtggttactgataactataaaatattccatatccagataggagtattatatagttaactatgcaataagtaattttaacgtaaatagtaagaaatagtgtgagaaacaaagaaatagaatgtaatgagtgcaaacctgattaaaacctttattattaacgtgacacttaaaatccaatttaaggcaaggagaatcagtatgagaacaaaccaatatcattccacccttattcacatcaaatttcttacctacaaattttcaacataattattacaatatggtatactaataaaatatataaatgtgtagatattttagtggaatacctatattgaaggccatcatagtgccattattattagtaacataataactttgtcccttttctaaattccagttgtcactaaaaattattgttaattaatattctaatattcttacacaattaataatataaataagaatattaattaatgtgtaaacaaaaatgagtagtttgtgaataatttatgtagaagaagatacaattcattgagatgtttgattggaagattgttggtaaggtaaagagagagttgtttgacggaatggaagggagagccagtggcgtttaggaagtcgacaaacttcttccctaaagcctgagcttcctttaatttacagctatttagactcataatttgattgttatgtgataaataattaatattatcgagtttgattgcccaatgaatgtgtcaccactatttttaacactatgccttcgataactatttgtttatattattttatattaaatttataatttttttaattaatggaacaagttacacaaccggaacagcaacccaatcgcaataaccgacaaaccagtatcttcctattatttatacagttataacttactgttattagataaatatgtgtattggtgatggaaaatgttgtagattggataatacagttgatatttcaactgataattttgcgtctgatatattcgttgtttaccaattataagaagaatgcaacactaaactcaactgaaatactcaaaacattcaaaaattatctcaaaccagatgatctcttcgtatcttgattcataactaactaacttattattatactattgtattattaccatataatgaatttaacgttgaattgtaggatgtatatggagtcataactaatgatataaggatagatttggagaatattgacccaagtcaaattgcgtataagaacgagaataagtcttatttttacaagagaaattcacctttcgagcctttcattctcaaatataagccctcccataagtttctcaatgataaaaatgataagctgttcctcaccatcttcattattcctcataaagcatatctacacaaacatgtatgttttaaactattttcatcattttaaaatctttatatattatttttactaaataaatagttgtagctatagatagataactttagaataactctaacatgtttataggaggaatttaataaaagtcagtttaaagaaggcatagaagggcattatatactgaaaacagtgtcactgacgagatacaagaagaatttgaaaccctccgcagtgagtttaatggactcggaaacaagtgtggaaagatttagaggagatgaggaagttaagtactgggttccgagagttgacgttaacctagtatatgacgataaagagcatttacaggtgaaaaacgacccttactttgacacatttacaaaacattatgagtttcgtctttatgacccggttctatacttgtcgcaattctgggtactagaagaacacttagtaccagtactcattgatgctgcttctagtaacggtaacgtagaaaagtataaccctgcgaaagtatttaaagaactagaatatgagaagaatttgttccttaatggttttgtgactgatcccaatctatctccgtcaaataatctacagcaaatcaattcactcttcaataacactatgaacaatgaagatagtgttggtgttgataatgttggtgtcgttgatcctgatttaaatgtggatgaggaattgagtaaattaaacatggacgtcgacgatgtagatagtggattagttgaaggtgtggtagatgagaatgtggatgttgaattggaaattctgataaatttcagcatatgttcgccaatgtattatatgtttataagtcaaatgagtatgaacaagaacgttttcggaattgataatagtaaagaaatggacaccataaagaagatgctattgaatacctcaccctattatttagtcttttcacttgtttttatactactacattcaattttctcaatgtttgcctttaaaaatggtaagtcagggctctttattcaggatataactcacagttatatattatttatatagtacatcttatattgtaatgtgtagatatacaattttggataaagaataaatcaatggaaggattatcaacaataacgttaattattaacttggtttcagaggtttccttttaggcaattactgttaactactatttagtttacacattttaccttaaattagcgtaatatacttaatactatactaacagtctgttataatgatgtgtagataataatagcgttgtacgtgtacgatgatgagaaccgatcttatatgatattgtttgagattattttaaacatcttctcatccttctggaaacttaccaaggcaatcaaagtcaaattccacccattttgtcccttcatctcaatctcagacacatcagtattattatcatagtttatctagataattatagttattatggagttatggatataatatgatgtagacccatattgagaataaaacgaaagagtacgatagaatcgcaataaagtatatgtcgatattattgacaccttgcgtaactcattactcaactataccataatagatgccatatctaggattaaaatctcaattagagattaagaatgttataggttattggatatgcgatatattctttatattataataagcacaagtcgtggtattcctatatcatttcagttctagctggatcagtgtacactttcggtactgttacgtgggatgattcccgctatcccatcggggacttagttttacacttatttactcacattagattcaaatatagtattaatgtgttttataggatttataatgatgacaccccaactgtatataaactacagactaaagtctgtggaacacctcccttggagagcgcttatctacaagtataccactactttctacaaataactattaaccatatagtttgatatatatagttaatagtatagtgataataatataatagatcattgaatacgtttgtggatgatgtggcgtcgtttttaattgatatgccaatgcttcacaggttgtcctgcttcagagacgacatcatcttcttctgctatctctaccaaagatggaagtataaagtcgatccaaacaggacaataggaactactagtgatgataacgctaatactatagaaaaggctcctaacactgctgataatacggataagaacgatagtactgacagcaacaatgttgaaaatagtaatgatatggaaaataatgaagaatcagatgataaaatggtagaaaatgtgagaaggagaaattaatttattaacattaactttactatgtttattatttaacgctaatatagttgtatgaattttaaataaattaatgtaaatgaaaaaataaatgtaaaataaataaagtctaaaataataaataaataaaatgaactcgaaaaaaataaaataatgtgaatggaaaaggttgaaatagaaaaaatgaatggggagtagataacttgaatttattaaaatatttcatagatgttatatttattattttatttttatatatttcatttttattagatttatcctttctattttatttatattgatctagtttttatcgcaagtattttacttcattattatgtcggttaacagccggactaaatggaagcaaataaagatgaatcaataaaatgctttaaaatggcaaaaacggcgttttcgcgccaagattatcaaaaggtaattttccccgtttaatatcacaatattaggcgttgaaatttgccaccaaagccaataacatgttcccatcacaggaatatcaagcctttattgaaaaatgcgttaaactcgcacaaaactctccaaatgatacacctaacaattctaatgatttgccaaataattccaatgatataccaagtaaaaatttcaacaattacgattattattaataataacaaaaatattagttattatacaatattattcctattgtataatgttttagtgaatgattcgagtagtcgtaacgctacagaggagcaggaaagtctgtgccgtaaaatcgtaaagtcaaagaactattatgaaatactgcaagtccagaaaactgattcagttgagaaaattaaaaaaagctacaaaaaagtattttttaccccaacgatacattttcaatttttgtatatttattctcattaattttttttctaaaattacctaattaatagccaaagttagcatagttaatataatcacttctttaaaatgctgtagttagcattgaaattacatccggataagaacccgtcgccattggcttctgaggcgtttaagaaggtgtcaactgcatttcagtgcctcacgaaccctaaggcgagggaagagtatgacctatacggggatgaagaacgcgtagttaaccaccagcgctaccagcaagagttcgttacccctgaacaacttttcgaagcatttttcggaattcatcaacgtggcaacgtatttcacttctctacacggccaaatactgctggtggtaataacaggtattatcctatttttaacctaattattcctcattttccacccattttatatgaatttagctaattatttccaatagtagttattacaattactgtgttaaaaatgttttaggagaactggagtgatgcaattcatgcctttattagtattgatgatatttatgctgatcattaatttgttttcgagaagtcctcagctgtatcaatttgagaagagtacaaagtttgggaaaatgcagtcgacgagcataaatggagtagtgtactatgtagacgctcgtacatttgatcgaatgtaccctaacaacacacctcaacggattaaagttgactttgaagttgagtacaagtattacgaaaacaaatgtaatgacagtaagagagagaaccagagacaaatttactcctatttgtcttcctttagaaatcctcctgcagaactctacgaaacacccaaaagctgtaaaatactcaatgatctcaggcattcctactccaagctgttgcaaaaatatgaattttaatcttcctgtcccattatacatactgacaactatgttattagtatattagtaggatatgctattgaatagtatattagctggtttggtcaagtttttgatttgtttccttcaacatggtgtaacattcactaaaaaataattagctatataagtagattagtgatttagttaactgagtaatatagtaccaagtgcatttgagaagtgattcgaagaagagtggagataagccttcaatgaccattggattagatttagattctgatttatcggaaggaacataaaacaaacgacacttcttccaaacccaataaccactcaaaatctcaccaaacctattataccatgatacactcattaatagactactgtatagttagtagtaactatatggcaggtgttaataactgagtttaggagttgtattacgtgattttaactggtgttgagtctttagatgttggattcaggaccaggaaattcactaatcaatcaattaggatgtgtaaaatcagagtaatgaaaatgtgtaaaaatgtgttacctggatctgtaccatcacagacagcaaaatatgtacaattactagcctttggactcattatatttcgacaaaaacataaacagcctataaataataagaatgggtgtaaaataatgttaattgatagctaaacccagtgtaaataagtaaaaaaagtgtgtaatagtaaaaaatagttgccttctttgcaacatttccatgcttggcgatatgataatttgatatcatcaagtgaaggcattccttcaccgtaaattgttagtccattgtagtcaactttgaacattgactcgacatcctcaaaatcaggtacaaattctcccaacctaaaaatgtttcattttataaaatgaattatgtgtagtttactctgagtccattcgttaaaattattattatccttgttatgattattattacccaaatgtgtagaaaatgtgtaacaaaaattttatatagggatgaaaaatattagtttaaaagtgttaatgaagacaattgtccaaaagtatttagataattaattttatcatctcttgtttttaaacgattccattcataatatggtattatcccaatattatatccctaacgacaacattaatattattataattattattatagaaattataatgattagtataatttaaaatactttgagtgaaagtgtggattgatgaatctgtgtgaatttgttcaattggtgtgatttagtgtagtagctgtatgggccagcgcataaaataacaaagttaaagtccttaatgtaaatatccgccctcaaataatcaaaataaatattcttctcatgctttactccacaatctttcaatattaagctcatttcgtaacaccatcgaggcatttttttactctaaaaattcatcaacattattcattagtattatttattgttagtgtgaaaattcttaaatttagtgtaattatggaaacctgtttgattttttgatctttgataaatttgatgaaaaattgtaaatcctcatttaaatcattaatgaagtctaaattaatataaaatgtgtacaaaaatactctgatgtttatgttgtaagtggtcaattatatactttagtttgagaattttataactttttaaactttccctcgatttattcaatgtgttcaaacatctttcaaccatctaataatcataataataatataatagtaatgatatactagtgtagtgataaatgtgtagtttgttacttgtagattcggttctaatatacaaattgatgtgtataaatataatacaattccttgcaaatcaactttatcctacaaaatattccacagttgttaatcaatggtattgtataactatattaagtgtgaaaacctgtagaataaagtgatgaaaagagttatagcaagagttataaaagtgtttcgcttcgaaatccagttttgtgagtgagtgtaggaccaaggaaacgagttctggtgatagctcgttcttctcaatcgcaggtcttagtcttctcttcaataatctcaacattaatacattcctaaaacaaattataagaagttactctctagagttagctataaactagatgaataatgtaaaactgaatcccagtggtgtataaattatctgaaggatggaaacctaatatccaatttagctacagaagaaataagaagagaagcttgcagaggatcaatttgactatttctaatgagaatcagtttataaagtgagttccaaaacctaaaataacttaaccctccagtaaacttacttaatatgatacatgttaaagaatgataaactattagctactaatgctatatcttgtatattcgccttatcattctttaatagaaactgaataacattatttttacaatgtgaatgttaataatttgagtaaaaatgagatacttcattggtaattaaatcaagaatatcataattacgtatttctagtttcttcatactattcattattattgataatcctacaaccatatggaataaagttattatttaaatacttaaccataatattgtctataactagtactattgtctataactaatactaatgtatgactatataaagagtatttaaaacctgtggctgaaattgtgtgtagatttttaacaaggattgggaaaagagtgttgaataagtgagtatctttatacctataaaagatgaacagagtttgaaattacctgattttcccaaaggaataaaacaccgtaacaatatcagttgggtgtaagagggaagagatgagccttaatctctgagcatatctgtgccataggctatcattatagactccattactggataatttatacacacttttcaacaacttatttacatcattatcctgcaaattaactacttcactttccagatttatctcattattagttgaaattggtgtagtatctgatttgttagtcttttgtaaactataattcttaataagatcattggaatctatggtaaaagttgcgttaatagttgaatttggtaaaaaatccttttcaggtggtttatatagcctttcaatggatttaatatttttaataacctttttgcttaagccttttctcacattttcaacgatattatgcattttattctaaacacagtcttccgtcaattaaacattattaccaaataataaaataaagaattttataatatttcataataatatacaaaataataatatataatttgtgccatagaagattgaaaaatgtattttttaagagtgtttgaagggcttttcgaggttcaaattagcaaagtcccaattaacgagattccaccaggctataatatttgaaattatcaaacatatatattgtatagtaattattatactaatggtatgcttaattaataaagtagtaaactgtaaatagctgtaaaagtagtatgggtatataggaaataatcagaggtgaagaaataccattaacatatgccgccctgtcatttctgtaatcaacgtaataagcgtgctcccatacatcacatgctagtaaaggtgttccgtgattatcactaaaacatattccatcaatatactatcgatttatttaggtaaatttatataaaatagaagtgaaaataaaaaaataaatggaaaaagagttgaaaaatgaggaatagctgtgtaaatgtagtaaaaactgccattgaggtaccgtaatggatttccggcgtcatgtgtttgtacaacctcaggagtaccgtcaggtttgagtacaagccaaccccaaccagaaccgaaatgaccgacgagaacacttgaaaactctttcttaaaattgtcaaaggagccaaacttctggtccaaaagctttctcacagtcccacgaggctctccaccaccacttggtgacattgaatgccaataaaaggtgtgattccaaacttgagcagcgttattaaatacggcgccactctcggttttcaataaatctaacacatgtgacaaaattatctcagataggtttattatgtagtttaaagagttaagaatgaagaataactgggtagataggtagtcagaagtaccttcgagtgatttggtttcaagtgatgtacctttaaccaatcctaaagcaacaattaaaacaaatcaaaaaattgaattaaataattagaagagaaataagggaaatgtgtataaaaggggttaccattgagtttattaacatatccggcgtgatgtttggtgtagtgataggtcagagtttcttcactcaagtgaggaacaagatccttaaggccatagggtagcggaggtaatttgaacgacatcgttgattcctgcctaataaaagaagttttgaaaaagtaaattaaatcctgggaaactaaaacgatttagatttaaaaatagaaataaacttgaaattaataaagttcagaacaagttttgcaaaataactctggtaaaaataataaagaagatgattacatatggtttgatggggagaattgtgtaaagaaaatgaaataattttctgtaaaattcttttcaaatgtttaaattaactagaaatatgaatgctattattttaaaaaagtttaaacattcttcttctcccaattttccttccattcaatagttcttaaatagtaataatatgtaatacatctcaaatttgtgtaatatagtgtaaaatattgtaaaatagtaatagtataaattgttgtaatataatataaaaaatggaagaattatatgagaaattggagaagttgaagtccatgttagatttggattttagtgttcagaaggaaacaccttgtgactgtatcttaatagcagttcacgggatcggaaccactgaaaacatgcttgaaaatgattataaaagcctaaaacacagccttgaagtggttagaaagcattggttttataatcaaaaacttaaacttcatctttgttttgttaattggaaaagatatatcgttgatgcacaaaataagttacttcttactagattttatagttaacagtatatttaagtcataaagtaatattgatttgtagattatttgataattattgtatcgatacggttaagggcatgagacgagtgtttaatttggcagtaatggacgttattttctacctaaaccctaaattctcagattatctcatgaacaacttcgcaaatgatttaaataatgagattaccagactacgcaatgtaatacttataatactatatatttataatatacttagtatagtaatagtgtaccaatataatgtgtagcatgtgtctggtcagtttaaagattcgaaaattgccataattggttattctatgggctcagttttggtcgatgatctcatacgcgttaatccagaccgacttgtatgttaattcatgctttacatttccaactcttttacacagttaacactagtaaatatattaatatctctgtatcttaagttgtagtcaaatattgaggtatcaaagaggcctagattggagcataaaattgattattttttcgccattggaagtccattgtcatccgttctcgttaatcaaaatccccaagtatttatttcacttatttaatagtacaataatactataacagtggttaatgaattgtagtttatgaaattgggattgaaattacctgaagatataaagtgctataatatttttcacccctatgacccaatagcgtcacgttgggaaaagttaatttaccttaatatgactgtacctaagcctgttattgttccgtattggtacaacaatggtttaaaaaattggtataatcttgatcaacaatttcaggtttcctctacaaccaattaagaatatattatcaactacatatactagagtgtagataacactgtttaatatggtcgtagtattgtaaatcggtaatagcggagaatctgagtgatttctcaaacacgatcactaaaggaatttataacctctttggaacaaatcaaaataatagcattcttgaccaaaatatcaccaataattccaacagtataataatcacacatttactctatagctatataataatactataattaatttatgagtaatgtgatttgtaggaagaatatcatttaataattttcgaaatagtgagtgattaatagtttaaagtgttttagaactgaaaggaaaggattctgatgagagattaaatagtaacaataaatctgagtcatgtttgactgatgaattggcgtctgaaactgttagagacgatgactttttcagcgattttgaaatggatttgtcctcaactaatgctttagaaaaggctaatattaataataccttacctaagagatatgattatcaggtatttcgatacagggaattagttttactcatttcttttatatttgttataccatgcttaacatatcactgatattatcacattctaacaggtacaagaagacgcaacggaacattttttgaaccctttggctatattgcaatcacacataagttattggggatcacgagatgttagctttttcatcctaagttcaattcatccagtaagggaacgagtacctctgacaactctactagccttcgttgagtccaagtcaaaggcgctctctttttctacggataatgaagatctgaagaaggagtttttaatggtttcagaacaggctaaaaagttactggaacaaattaatcgagaggtttgtgttcaagaaatcccctatatttactccggagtcttacttttacaattattttatccaaaattagttattttatttttaacagtattataatactataaatagtagtaaaatagtataatttgtaataggatataaagaatagaaatgatagtataatagtgttgaaatcaacctggaatattatgaataaaagtaatgatgaagacgcggaacatccctacgaatccctcatctctgaccatatcgatcacgatgattatatcaactagtcctccaccacactcattaatataattgacactattatacatgaattaacacaattacatttatatttgattgtaaaataatgtaattagaaaaaataatatatgagtgtaaaaatactagaaaatcgtttaaagacgattctggaaaaaagaggtttactttggcctccggaatctttcagtaaatttcacattacatgctgtaaaataggtaaattttcaaatatttaaattttccctaatattattaacaaaaaatccaatagaaggagaagaatgcgaagttgtattaattgatgatattttggaagatttgagagaatcgttctatgattataaaagacaaaaaatcaatattttaaaaaatataatcaactcaattctcaatcaaacgattccagagtatttttcatttttaaatacactagtttaatactgtggatatatgattagttcgaatacaatgtaattattttgaatattaaggatacaaatttttattagtgcaaatatgaagaagaaaaggaatattaatgaagataaagcaaatttagggttgagtatggatttggatgagccaattattaatctcaataataccttaacaaataattataaacttacaaataccaataccattaataataataagattaatggaattaatggtataaatcctgtaaataatcctagtaatgataaacaaaatgatttggatgaggaagaattagattataaattcataccagaattggatgttaaaacgaaattgaaagatgttggtggcatagataagataaaaggtgaaattgaagatttagttataaaccctttaaagtatcctcaattatataagcatttgggggttcaacctaccaaaggcgtcttgttacatggcccaccgggttctggaaaaactaaattagcggaagctattgcaggtatgtatacggctactccttatctaacatctttgttaatcctattgttatctattttgcaattcttttgtatataattgagtatattcaactattatttttcttaggagagatcggatgtccattttttcgagttgcagctactgagatagtgacagggatgtcgggagaatctgagaacagacttcgaagtctatttgaacaggccaaagcctgtgctccaagcattattttccttgatgagctcgactcaattactccaaaaagggaaaatacgtttagagaaatggaaaaacgaattgtttcacaattaggaatttgtatggactcacttcaaaatcattttgttattggtaagccatttgttcttcatttcaatttttatatttcattttgtaattatttttataatataataaagtatataataccctaacgcggttagtataatgtgttatagtgattggagctacgaataggcaagaatatgttgattcgatgattagacgtaatggtcgttttgatagggaaatatcaatgggaataccaaatcaagaatctagatatgatatactacaggtattactaccatatccatttactattttgaattattttcccataaaattgattaattatatttatatccaataccattataatgtattaggcgttatccgtgaatataaagattgctgatgatgttgattttgaagaaattgctaatttaacccctggatttgttggtgctgatcttcaagcagttctcagagaatccgccatccactccatatcaagattattcaaatcctactccattgccaatactgtaactctcatactcattacttagttattcattttttcaaccacttagagtatttacatatttatatttaggatatgaatgatttgatgaagaatttgtacataaatagggaggattttttaattgggattaataaggtccagccaagttctaaacgtgaaggttttattaccatcccggatgttacctggtctaaaattggggctctttcatttctcaagtctgaattagaaaaacaaatcgttttcccaattaaatacaaaaaattatatcaacgtttcggtattggcatttctgctggaatcttgctatacggtcctccaggtacttttttacgaagtttgattcttgctatcctttctgggacttagttttattgtttacactaatttagttaatagtattaaattattgtttaggatgtggtaagacgttattggcaaaagctatctccaacgaatgtaacgccaattttatctcaattaaaggtaaattaactcacaaattacatattttacccagttatttacatttatatacatctaactgttgctttcctaaaatatatttagggcctgaaatattgaataaatatgttggggagagtgaaaaggctattagattaatatttcaaagagctgccacgagttccccttgtattatattttttgacgaagtcgattctctttgctccatcagaaatgattctaatcaagtttatgaacgaattgttaatcagttattaacagaaatggacgggatacaggtacttcatcactcttttgatactgactattatttgcgtagttttatcattaatacctgcttatatacttaatattagcatataattagtttaataattattatagaatagagaatatgtatacataattgccgctactaatcgacctgatatcatcgatcccgcaatactaaggccaggtaatttccactttaacactttatatacttaccactcactcataactagttaccatagtagatataatagtggttaattgtgatgattaggtcgattggagaagttattttatgttcccttacccgatgaagatgatcgcgtggatattttacttaaattaacatctgacgttcctgttgatcccttggttaattttaaaattatagcgcaacgaactaacgggtatcttttacttcagattattaattctattgcccacatagttttacactattttctctaaattaaccgataattagttgtcttatagttaagtatataataactttaactggatagtggataacactgttttaataggtttagtggagcggatttggcgagtttgtgtagagaagcaagtataatagcaattgacgagataagaatgagtatgagtgagagttcagtatccgattataaactgagtgccccagaaaactcagtgttgaagatggaacactttcaaaaggctcttctcaaagttaaaccctcggtcaaacaacaacaaatcgatttctaccacaatttcagacttaaatattcttagccaactttcaatacactttaaataattgcaatagcagttatagatactgttttaatataaaaacactaaactaaactatatgtgataataatgtacatgtatggtgcgtagaaaattaattatagtggataaaaacgggtttccagccatttgagtgtaaaaattggcgtttaaactctagttgttttgtgattttattccctttacgaaccaattcaatgtataatttaccctcaggatcaagtgcaactatgtaataaacaccgaccctaacaataattaaccctttagcagttcctaactgtgattctatcagctttccattcttctccaataaattactagtgattagatattccttatcattggtgtagtttagtagttttagatacgataggtcgttactgagttgtccatactcatgtgggtatagtgtggtaaaatacatttcacacaactttaaacccctaacaaatgccaatttcccctttatcatcaatttattcacacttgacgatagtatgtaatctaaacttttcatacgatcattgttattttcaacttggatttgagggagtttaaatagtttgttagtacactgtgggtatagcaaattattcacgaacttattctctacattatagtggtttatagaattatcagtattcaaaggattgattgaagtatccttataatacttcaataaaaacacatttatagagtttattatggaattaaacagtggaatgtcgatataattgctttgtaataatattgttagcaagtgtgtattcaacttgatgtacttatactcgaacctcatcttatcttcactattatccaactcatcatccctaccttcactaacagtgtcaaagagattagtagtgctaggatgaatataaggggaaatgcgtttaattaaatgggttaggtttgattttgagattgatttaacaacttgaataaatgtgtaaaccgaaggtttagaggcggatttatcaattttatcacataacaaataaattatcttctgatttagtggtttgattccctccaaactagtcttaacataaatgttactaagaccaattaacaaatcaataagctgttcaatactgtaatggctcagatgtttatttaataaatgatataatccatcaaaattaacccttaactcctcacataatctcaattttgagttggaaaatgatctaaatagtgctaataatacatccttttcatttaacccgttgtttaacacatttccattagattcagcttttagaatatgattactaataacttttatgagcttctgattgaatgctgggtgaattaatttgtgtgaaatgttaagacaattgtttagaatttgatataaagtttccaattccaattcttccaattgattcatcaatccagtcatactttctttgatattcttcttctcttctctaaacactaaacaatatatttaacaggatattaatagtagtattagatacatagtattttaggtatatagtattactatgtcataggtatataattagtgtaattggggtactttgagcatgttttggagtaattggataatgatgtaataatggtttaaaagtattaaactgcgttataaggtttgaaatggtagtattattctgtgtaaaactagaataatgtgtagattggtgcaaaacatgacataaattcctcaatttatacctcatcttaagttttaggcttttttggcggctaaatcacaatgttgacattatactaatatatatctatatatatctatatatatctataatatactataactatatgtatctataaataagagtgtagataaaaattacaggtgggaagagagcgcgatttattgatttagctgcgggtttgagaacacaatcgtaagtaatgtaaccgatttccagtgcgatagatgtaaacaaaacacgccttacgataggtaaaaaaacagttccaacgccatacgacatttttcaacacagttttagtaatttcacataaactagtggttctatagtttaaaataattaattgattttaaaaataataaaaatactttaaaaatacagaaatataaaaaataatatgtaaagaagcatacacaacaacgcaaattggggaaggaaattaatttttaaaattattaacattatcatttattaataaattaaccgagtaattaattattgaattattatatttcttgattaattcttccgattttcttaaatacggaaccaactcttcccttttctcatttattacattatttactagtttattcagaattttaaggttataatttaatataaattgatttgaaggaattgtttgaactttaacattttttgttaccttctttaccacttcaataagtttaccatactccattttattgtacaatattattattttactattattactcaaattgttgagtaaatgtttataaaaatcctccctcggaaaggtgtgaaatatgactaaattaacattttttagggataaattatagtttagtagctgagtggttaaaagtagtggtttgttgagtgagttgaataaatttagtttttcagctctttcgtaagaatttacacagttttgtaattgcactgataatgatttgaagggttcaatctcagccattttgctcaggtttttcctatttgtaaatattaagcaattgttccggaacttgactgtagttaacttttgtagtaagtttaacggtaaaaaggttggtaaattgtaattacaatagattaaattcctgatcacgccaagtttattcctattctttaatactttacacaaacaactctctaccacatcaccctttaccacgttattattattggtgttttctgttttttcatcggtaattggaattgttctatttaaatcaatttccagttttaacaaatctgttcttttatcaccaattaacctttccctcgttcctacaattatgttatcatttcccccctaattttacataatttaactatatagcaatataactatagtatacaataccttgaacaaaattgtagagtgaaaagttttgtagatatttgttagaaaaagttctcaatccatcgagtgagttaattaaacaaataacattggagttattaaaaagttttaaaagttttccaacattattacagttaatagtttctgtaaaattagtaaaaagaacaaattcaaagtcatgggaccttaaaacagattcacgaatttgtattaaatgtttatccaacactaaaacaaaagcagctttaacaccattatcaatgttataaccagttaattgagctatgttaagactcgaatcaacactaattatgaaatttattaattttttcacttcattattattattacaaattattaaaagttttctatcgaaaccatttacagtagtttcattgtagtttgagtgtgctgtagaaaagcgatataaaaatggtaataaagtaccaatagtcttaccagtatttaaatcattatataatactatttttaacctttcctcattattaattcgggaatttattagggaattaaatggtaaaaaggctaatttatctgttaaaagtttaaaagtgtagtattgaaaaagttttaaattgtcaattccaagcgattttaaattatttacaaatttctcgttaaatggtaaattttgaaaatcaacagttttgtcattaaatacatttgtactaaagtaattaattctcaaaatattaaaacaactaattcgcgaaatattataattaaaatttggatttattaatttacttccaattgaattaggtaatctcaacatcaaaataattaattacacatattccactaacatagataatataattgtggagggaaattggaatcatggtaaagaatcaaatatttaaaaataatttattaataatttgaagaataagtaaagaatagttaattttttgtgtaagatttgttacacatttcaatttttcgaccctaaaattgagtttggagaatcttccaaatgcgtttcaatccttccccgttaattcaaaattttacaaatttttcaaatattaagacaaaaatattgattgaatctgatttgaatgccaaaagtttgtccaaattattcacgcactcatttgcattcatggcctttactcatttttgtctaattcttcctagaatttaagataatttatgaattttattagttaaatactctttttgtataatactttgcatcgattaatattttatataaatttgttgaatatattctttactatacatatcgtttgattgcagttttgcgttaatttactgaaattcaacatagtaaataagttttttgtaaagttcaataataaataaaataatgtgtaaaaaaattaaataatgaatgctacttgaaattatcagcattggaatagcaatgagataattggaataaactcaaaaatgattaaaaagaagcacaaaactgataaaaatggctcaattgaacatgtttataattttaaccaaattacccttctacacaaccataaactaaaatttcaaaatcgtaagtttcttacacattttttgttcactacattgttatagtataaaataacatgattaacagttaatgtaatgatgttataggtcattggcgtctaatatgtctaatattgataatattagtattttataatgtgagaggtgttgggtgtgagttggctagtataaatccgggtttaccacccggtgtaaaccctgaactcattaaacatagcgttaacttagctcaacagtccaggagacgctctcagtcgaaagttccaagaaacaaattaaataaatcttttcaaaacagtaccactggcagtagtaatgatgatagtgacagtgatggcagtggagatgatagtgatgttgaattgccctttagaacagattcagaggtttacacgaggaaaaaactatcaaaagataaacgcaatcgcagattcacggatctagaaactcataaacgaagaccaattaatcctttaacaaaatatccttcagatgatcaatctgaagaaaataagccgacggataaaacccctttgctagatacccctttaaaagaaaaacctaaagttgttaaacctgtgccaattaacccgaatgataaaaataaacctaaactatctgaagccacccctattttgactaaaactaaggataaagatgagaagattggaccatttagcgaaagattacttagacccatttctgacaatgttgatttcaataatctaccattcaatactaatactaatactaatactaccgaaactaacagtaatgatagtactacaaaaactaacaccgctgatagtactacgaataccactagccctaatccgttaaaccctaataccggtaataatggagttaaaaaaatgacaccaccgaattcacctacaatgacagcggaatcgggatcaggatcatcggacgattttgatgtaaatgaggtagaagcggtgaaaaaatcaaaattagacccatcaattacacagggtctgggcaatagtataccccgaaaatcgcaagtgagtggaacacaaatcccagtggcaacatcttttgaatataatagatcagcacatgtattagaacctaaatttgaaaagcctaaagtaatgggtggtataatacaaacattaacagataaagaatccaaattacgtagaatgaccaagcgtaaactaagaatacaacatgatctaactctgtacattagtaaagaatccgcaaacgtagtgaatatgttaaataatggcgaagtaggtaaacttcaaaaggtccatcctttagtatatttgagattacaagaggttttccaatcacaatatgctttgaaccaactattaaaaaaggatggagataaggttaaaagatacgataaaaactggtatttgaattccacgcctactgcaaaagcctcttttatagaggaaatacgtaaatacactaaggagcctgaattgtatggtaaattcaaacaacctaaaaagatgaaggaaagtaggaaattagtatatgaaaagttagaactatttcataatgattatatttgtcagagaattgttagggaaaatcaattttccgataagataatacgttcatttgaacaacaatctggtttatatatagccccaaattatcataatttagtgccggggttaggaaatctatggctaattaagaattttgaacgttattacatggaagcctcaaggtctaaagtaactacttttagtaaagttgcccctagtttagttggaaaattcatgttaatggtggaaaatggtactgttttgccatcaccaccaagctctcaagttgctattcattcactttctatcatcttatcaatggttatggaaggtgttagagaaccacaattgttccttggtaaaaagaaattttatggtttcatgtcattgtgtgatactaagtgtatacaaacactgtatgacaatgataaggtagcaacgactgagaaaggtgttggtaaaaagggaacagttggtaaaagattggcacaatttttaaaatgggtgcaattgttccatactgaagatttattattaattgatacatatgcacagagagtattattaagcataatgtatgcaataacgagggaagacttttatagaagttcacccaggaatgtacagttgagaatacagtcacaattcaccaatcaaaaaccttcacaatcatttttacaagaagatagtgatgatataggtaatatattaataatttagttatttaatgcctaatttatactaattttaaaatataatatagttgaaccttcaatgttggaggttggccctgatgcacgagagcgcgagttacgagaagctaacagacgtctaatcgaagattacaacaggcgacgtcaagaagaatatgaaaaacgccgacgtgaacaatataaagatccacataagcagtataagaatcgtcaagaatatttacgtgatcaaatgggtcgtgtattggatgagcaaagtaaggaggtacataaacagaaggcggagcgtgagaaacaagcttttgaggatgctcttaatggtagtgatacttttcaaaaagctatgcgtcagagggaagaaattcttagacgtgccagatacaattccaggatgcctagtaatgatgttgaaaatgaaaaatctcttttcactaatactgctgataacaccaatgataatgctgataatacttctgaagaaaagaacactgacgtgaggagtaaattggaaggaatgggaaatacgtataaaaaattttataatatgtttatgagtggttatcatgaacctggaaaatcagtaaatcctgaaaacacttctgaacaaatcataccattccacgtctttgccactagtaatggtggtagagttagtggtagtgttggttatgatcaccaattcttggatgttattaatgttattactgatctgaccaatttggcaaataaagattacaatgtgtattaccagagtgttaacactatcattatgatacgatcaatacatttagcattgcactcattcgagaattctaaacagaaaaaaattaccagttctaaaacttttggtagtcttttccgatatctcaacactgatagcaatggatatgtaatgaatttaactaaacaatttctaccagcaacttcattatcgttacaactcatattctttatacaagagttagtcgagcgttatcatcatggtatcattggattattaaggaaattctttaaaaatttactatttcgtggtattattagggccccaactaattttagacaggttaataacaactttaacacttatgttatatatgatgataaaaaatacaaaggtacattggaaaccgtacatcagcttgtgaaaatgtttaaagactcatttattaccaaagcatccataccaataccaatcatacaatatattaccatattcttatcattgtggtcacaatcagattcgcaaacgtttaatatatcagaccgaagcgagaatattgctaggaagatgttcctactatcgtttttggtcaataaaaggagtttagctgatatggcgactgaaatggttttacaacattgtgcaggtttaaaaatgttacatctgggatgtgtgtcaaaattaaacaacaacaacaaggaatgtaaagattattcactcctccttaaaaagaagaaggttttgagaataatgaggatgatagagagtacgtccatggatccactagatgtcataagaattgcatctgatacttgcagaaggtgtgtggctaatcttactgtgagaccacatgtcggggcacccactctattacagatggaacaggatttagatgatggtgaggatgatgatttggaggatgtggaggatagttatttggagttggatgagggattagaaggtggctccggtggttgtctcgattgtttaggttgttgtaaccgaaaaaagaaccaagaaactacttcaacttcaaactcaaactcaaatccgaattcaaattcaggtggtaaagattcaagtacagataaggatttatctactaatagtgcatctgggcaatcaacttcaacttcaagatcaggttttggtaaaagtggtataccatgtgcagcaggtagtggtacaagagcctttggaaacccctcctacttgcaaattcctaataatagtagtaatactagctctaacattttaaaaactagtttattgcagttagatgagagtctcgagcttaaaaataatattttttcatcatattctccggcaagttcaggtttgagagcttttaatagccctagtcttacaaaacctgctaatattaataataataatggtactattcgaaatggagataggcagagcaaaaataggcaagccgacgagtctaaacccacaaaacccttaactgatagtagctcaaaatccagtttattggagctcaatgacgatgtcaattctgaaaaggttaatgctgagacaggtgaatctcaaagcaccaaatctaagtccaatagtaattccgactcagaaaacagtaataagaaatggtatgatcctttaaagaaagtgaagaatgtatttaagaagaagatgacacctgaagaggaagcaatgatgttaccgcattttgttgatcgcttaatgctacattcagaaataactcatcgtattcattgttactatacccaaaagaccttagtgaagagactaataaaagaattaaaaaaagccaaagatgaattggatataaaacaaataatagcaaatgtatttggtgaatttagaagtattgaaattatacaatccggtatggcatcatcaatacaccaacttatatgcccattcatgatggaatccccgaatgaactcagattaccaattcaaaccaatatactacaatatgttatcaagcaattagtcagtaagtataagcttaatccaataaagaaagatttgtttaaacaatttaggggtaaaattaatgagttggtacctgatctagagggatatatgaaagtagatgtcgttggaagtgtatttgtaggattaagaaagtacaatggtatatattattcaggtggttatgcaccgtttgataagattgataagcctacgaatattttgttaaaacctggcgaagggagattagtatatgatggtgataatttcgtaccagaattaacagcactaaatgacataccttctctggaatcaattaatattatacatgaatacgattacgaccgtatagtttaccagattaatactggtaatggtgaaggtgctagtatagtaatgagtgagaggaaattcgcgttggaatatccaaattttataattagagcccatgttttaattacggcgaaagctttaatgaggatgggatttgatatgggcagggttatttggtgtggagataaatacggctgggttgctgatttttcacttgataatattgtaccagtttctgatgtgcctgtttataatggtcaatactggctcttaacatcgcaacttactgttaaagacgttgttggcaatgttccaattcgtttagtagataaaaaaagctatatggacactggtagtactgatattacaatagacgataagggactgaatgagattaatgttgagataatttctaacggtaagaaagttggtgaggtaaagtcacacaagggcgaaactctagaaggtgaggacgaagaggggatggaatttttagttggagctggaggagacaatttgagtgcaactcctggagcagttaagacagtgaaaacagcgacatacaacccaacaactcacggtctcacattagatttagatatgcctgatttcataaatatgtaacctagtggttatggttaacactactaattgtgttgatagtaaggtttaaaattaacatgttcaattttgcaaattatataatatgtgatgtttagataagaactctagtatacttgtattagtattgtaatgtatagtgaattttgatgagattaatgactgggcgtttcccagtcaaacaaatattaaattgttttattgttctggtttaatgtatccatttgagaatagagagagtgtcattagtccgtagactttgcctgagtttgactcgttgaacatctttatcatttcaatgttcttctcaaactggtctgaactcatcagcccttggctcagcttcagactcagtacatcattaaagtaagtaagacctaatcataacattaataacaataaaatatggataattaaggctatgtaactggtatagtgtggaaaattagaatagtaaagctgggaagaagatccgcagcgacaaacctggtgatgtatggaattcaggatgatgttgtagtgatagaataaaagtgcgtttactatcaccggcaagataacctaaaataggaaacttgtcagacgatgaaatattcgtcacgactaaatcagacaacgcttcatcaatttcagtgcgattttgatcctcataagaaccatagtcaatattcgagccatcaggcaacgatgtgataacatcattatgagaaaataatccaatgatactattataattctctacaacgcatttatttaagaataattttttacctttatttaaatcaattacaccattattagttttattcccattcaacttgttattatattcatatctacaatgaccgtgtgtgataagtgtttatcaatatgtatgtgtaagtattgagatacctatggtaatagttgaaaaatggtttgaaaaacgcagaggcttttggctcgagcttatagtccaatgcaaagaaattgaacccataaggcgctagtaaatatgaagaacccagtgcctaaagtaatttatgaaaaattaatacttagttatatctatctaagggataaaactaagacccccgtaggaagtaggggaatcattagccgtgatacagtacctgtgaaatgacttggaatccgaagcaaatcccaaacatgggaaatttatgtacaaagagtagccgaatcaagtgtctgagttcgccaagccaaggatccttatgtcctatcgaggcaaatccaccagttatcaataatcctacaatggtatatagtactatataacaatagtatattaaatagcaataataacggcataataaaagttgatggtggaaggttaccgttatattttagaacgtcgttgagaggtggtattttttgatgaattatattaatttcagtgaagttgaagttgattttcttattataatattctgaaacgtaaactagccattgtctaacaagtttcccgtgtctttctttgaagaggtcattatcgcaaggaacgaaaatctgaacaaagaattaaaaattgaataattaccaaaatttttaattctgaattttcatttaacatctattttaatgattttcctgtatctctctctatttttatcaatttttaacaaatttattcaacaaattcgttgtgaacccttatttaagttatattatttagtttatattatattgtgttagtgaatatgttaaaaattatttaatagatttattaaataaattttgaggtaaattaattttatttacacttttgtcaagacgacaatgttatcgtttattacactgattgccacacaaaatacacattggtattttcagctttatttttaaatatactttcctcaatcctcctttaactaatcaataatgattaaaaaatgcatatcgagagatttatggagtcggatcatccatttctttgatttcgaataaaccggattccttcccgattctttgctttatcttttcacaatctttccctaaacagttatttttattacgttactcgctaatatttcatataacaaatttaatacttagccaaactgatacttaaataatactattatgattaaattcaagattaattagttctttaaagctagttattttataaaataattttaatggagtatttcataccgtatgtgaaatgtaatacaatgtagagcactaaaacgacaccagtggttcctagagaaatgattgagattgagtatctgagagcgtcagagttctttttaatgagtttgaagggcatgagtgcgactgccaatgatgaggattcgaagtggaaaacgccttcgttcaacttcgccaacacagggttaaatatcacagcactcaatattcctccaatacatcttatctatacaacattttacaatttattatcgttagtagcatatggtgtaataagtatttagtgaaatcttacaattgatattgatgaagaatggactgaaggcatgactacattggcgagaagagtgcgatcaacgcagcttacggtcataaaggtcatcccgttaatgatgagacagatcgccaaaagtgggtacagacgcttgatgttcgtcacatctattaccaaaaacgatatcataaacgttattattcttatcccaacatttagtatacctatatctcatattaatgctataatacaataagagtatagtaatagtttgttagtgctacaatagtgtggaaagagtaaatatgtatgttatagcagaaatcatccccctggcgcagtacctatatttaatagtccatgtttaggccatttacgatcaaaatgatcagaaacgaaagcgccaataattccgccaataataccacccaaaatggttagccccgtagtaattgccgatacggtatttgaaagcctcatgtactgaattaataaagtcacataattaaacgccacaaacggcccatcactaaaaaagttctaaaatcattattagctcctctttacaatccccaataggggtatctaatatattaaaactatcatacatagtaagtaatgtgataatgtatagtatagttggtgttaatgtatgacataccaatacagctaataagatagaggtggtattacttaacgattctttaatgataaagaataagtaatgtgccaattgtttgattttatgagaaagtttaatcttttcgcccgtcgtattattatcaatacgtttgaccttgggtatgaagaatagaactggtgacgtaaccaacgtaacgacaccataggtgaataaaacaattctccacccgtaaatgtctctgtaggtgtctgttgaataggtcgttgaaattagacctgagatcattcttccaaaacacatcaccgcgtgtaaaattccaaatccaaatgccagcttattttgtagattcgtcgctataaacttctgcgctgatggcgttacacttcccatcaacgcgccattgaatatacgcaatattaatatctaaacagcgttatattattaatattatatgttagtgtgtaagtgtgtgtaggaaaataagacatgaaaaatggcgtgtaggagtggggatgattattacactacaacaataatactaaccacacagataaccttacactattaaacttagctatatactataataatagtatgaataatagataccagagtgtagtttgaaattgttgataaccatatgttgataagccccgttagaataattccaaagattaaaatgtattggagttcgattttatcgcagagagcaccccagatcggtatgaagcacacgagtccaaggttttctgccatagtgagcattgaattatcctttgaagtgaagaatagagacatttcaagccctcgcatagacgaggggagaatttggaggttaaagtactccaaaaacgttgcgatgttaaacactgaaaatatcaccccgacgcgctcaaaaaaacgcctctttaccctcaaataagtgttatctactacttcttcatccatgtttttatctaagttttccatctattcagtatactttgatgaaattacgacaaattttattttattgcagaaaagttcaatatattgtagaaaaaacgattacggtgtcttgtttttataatttacagcgaaataataattttatgaataatttacaaaaaaatgagaatagaagcgaaagagcgctagtgaatgtatagtacaagaattaatattaaactattaaataatttgataattatgaaagattttggcacaatttgtatgaaaaagatcaaattagtgcctggaattgataattgttaaaatttttgaggaatcaacagcgcttgcgtggctccccataaggtgtgaaaatctgtacctattttgaaaaattgctgtacttggattttacacaactttgatatataattgttaacatcgttgttaattagtaaataatcttaattattaacaatattgactggattattgattttatgtgtgtaaattcagaaaatgaacaaagtgcctaaagcaagtacacaatactggttcgtctgtactaactctgtacttgactcaatatcataccagatacttggatctataaagttcattgtattacaaacaaaattaacagattttacgcctattttttgtattaattttcatttttactcacgtgaacttattatatatttatcaatttatttaattttgtacataatttatttaatcaaatttgaatactttttatgataaaattcactgtacaaatactaattctacattattattacatcattggtgtgatctttgcccattaatgcaaaaaattgtacgagaatttgaattttaaataaggaaattaggtaaaaattaagtatatgccaaaattttattgatcaccgacaaatattataaatagcataaatacttacaaaattaagtgaaataaatgggtaaatggtgtattaaaatattattgattgggtaatagtgataatctccctttaatgaaaagtggtacgtcagctgtaggatattgaggttcatttttgggaccagatccgaacaatttttggccattaaatgcatttgttaaatccgaaaatgaatcacgggcttctcttaaatcatggtctagcatgtccaaaacagtgtgttgttcctcaattaagcgctccaaatctctacacgccagcagtaatcttatcatttcatattgatccttagcgtcaactttattgtaatactttgacatttctgaaatgcttgtgaaaggttttctccttggccttaaaaagccgtttacaaacttccagttatccttaaaatcattttcatatgatttttttgcctttaatttctgaattgttgcatacttcaagggatgatctacttccttattccatccatcttctatatatttagttccataattcgaatacacactttttttctcgccatccttattactactagtagtattgcttgtgttattagttgcgttaggggtgttacggttcatgtgggagtaaaaggatctaatttcattgattcttttctcaactttcaaccaaggagtataaccaacttcatcttcttccatttcgtcttctttattattattagtggtggtagtagtattttgatagctaggtgtggcgtttaaatctgacagtatagttgaactgtttaaccttaaagataaatcttcataaaaattctcattcccattattactattattggcagtatttactgagccatgagttgaaggggatttttttaaatttagtgtagaatttgagactagttttgttaatttctgggaattaaagttagtggaattattgtctgagtttagggggtttgagggtaaatgattatctccagttacattagcagtattactagcgttaaaagtgctatcactgggtttaacaggaggtgaagcccttttaggtacaattaaaggcaatttaggcataaccattatattacgtataaagttgaacaatctaaacactaaattttaatgtgtaaatgtaaaactaaaaattggaaaaaattatcaaatttaaagcttaataatagatatttaatgtaaagatagggtgagaatccggagaattttttaaaagcaccaaagtgcgtaaacaaatttaaaccaaattaataaaacattaaccaaatcgcacaaattagtataattaacacattttaatataattaacaagtggaaatttctgcacattatacaaaatattcatgataaactactagtatatagatataacaacaattatgaagtatagaaactagtaaaatttaaaaaattaatttatttgtaaaatacttaaaattattgtaaattaataaaattaataaaaattataaattcacctgataacataataaccatgtatcaatattggtaatgttattgtatcgcagagttttttgtaatttaaaaacgtttggaaggtgttttacaacatttgagaaagaatatgacaaatgttataatttgttacccttcacacagaaggagaagattctagtaaataacgccataattaacttggcaaatacctgtaatataagtaattttgaccaaaatctccggattcctctgttttttattaaaaattccgatttcaggaatagcttaataagctacctggacaaatcaaacgattttaagtcctttttcagacaaaatttagctttactaaatgaaaacaatttcgacgaggatttacaccttgattttctcaaattcatagagacttttatcaaggataacttcccaaatgttttcatcaccttcaacaatctcaaacatttctccgtaatccaatattttttacattaattttatcatttttacctagatttgtgtttttagcgtagttttatagttttttagggtatttatattttttaggacttttctaaaatttcaaatttataccataattacactaatttctccaataacaccagtggtctctgtagtaacgatgttactattggtagaaatgtgtatttacatgttggacctccaaacagtgggaagactcatgattctataaaagctcttttatcttccggttcgggtatttattgtgctcctttacgtttacttgcttgggaaatgtttaacacgattaacaattctggagttaaatgttctctattaactggccaagaacttgtcgataatggtgaggtatcctcactcgcaattctcactattacgttacccagttttatgtagttaagtaaataatacacccatcggtgataacgccttagaaaatgttgtagccacatgtttcatgtactgttgagatgataccgtttgaaagaacatttgaagtggctgttttggacgaaatgcaaatggttggtgacttaacacgaggatattcttggaccaaagcgtttttatcactcaatgtacacgtttttatacttatttactactaacactaattatatataattgtatatatgatttaggttcctgaattacacatctgtggtagtaaatcttgtatttctattactgccaatctcgccaatattagaggagataaagtaccttttacaccatttatctattactattactagtattaatgtgcaattggcgtagttggagatatttgaacatgaacgcttgtgtaatttaaaggttatggataaagctgttgggctttccgagttggaacctggtgattgtgttgtctgtttctcacgttatgatgcttttaacttacgcaacatcattgaatctaccaaatactcctggaataccttgtccgtatcttgttaactattattacacacatttacaaatattctacacactaaatacaaatatatttataaaaaatgtgcagaaagaagaatgtgtaacgagtattgtgtatggattattaccaccagaaacaagatatgaccaaatagaaagatttaataaaggactgacaagggtgttagttgcttccgatgtgattgggatgggtgttaacgtgtcaatcaggcgtgtgattttctacagattaacaaagtttgatggaaatgtttcaaggcctttgacagtgtctgaagtacatcaaattgctggtagagcaggcaggtttggaattagttctgaaggttttgtttcctgtgttagggagcaggacctgccaactttgagggaagtaatggctcaagaagtaactcaaattgaaaaggctgtaatttcgcctccactagataccattggagctttttattcatcacttaaacacttcacaggagaacagcattcattattaaacattacaaaattgtatctcatcgacactggttattcctctattcccacctggggattagctttacacactcactagttatatagtgatatactatattactatatattactatatattactatgtattgccatattaagtagtgtaatgtgctgtaggattggttctattgggagagttggtcagggttttatgatgtgtgattttgcacagattaactcagtttcaaggtgtttagaaggtataaacttaccattcgacatcttaaaagagtatttaatggttccaatgggatcaacactggtttcgctgattgttagagcctttgctgctagtcactcactactcaattcggtcaaaatctcaaacattatccaagcagattttttagcccacaacactacaaattccagtaatctaaatgataatctggataacaatctcgataataatttggatgataacttggacaataacttgtgtaaaaatagtgaaataaagcgtttggaattactgtatgaggtaatgaacatgtaatgatataaataaatcgtttaggtgttggatatatatgtttggttatcaaacaagtttccagtggtgtacattgataaaacccctgtaaaagaattaaaaagctcactggcaaaaacactttctaaactagttcgtgaaccgaatgaagtgatacatgaggatgaaaatgatttaaatatagttaagaatattcttagacctgaattcaacaactagtcctgtacataatactctatacatatacattatgtataaaatatatataatagtggaaaagagtaaaatagtgtataaaattaggaaggtggtgctataccatcttcttgtggtaaaggtggttgtatttggtctggcattggaggctgtgcttgatctggtagtggtggttgagtctgatcaggcaatggaggttgcatgttatcaggcattggtggctgtgtttgtgttaattctacaggttgtactggctgaacatattgcatatattgataggtgtttggttgtatatacggatttggctgaacgtatgtttgattttgttgtgtttgaggatttgcatagtattgttgcatttggttatagtactgttggtactgtaacgtttgatactgttgttgatagtaggccatttggtactgttggtatctctgagcgctttctggatcagctggaacccctaccaccgattttacctcctacacatttattatgttaattatatagttaataatagtagagtacataaatatataagtaagtgtataagagttacaggttgtatgttattggtatcttgatattgttgtagtactaaatgtgaaacgttaatgccttttgccaatttacaatcactagttatatgtcccatatcaccacataatgcacatttctataacattatatcaactaatttacaatatttaactactataataagtatataagcatatgaatacgtaaaaaatatagtaaggagtagtatagatacaatttcagctcttggaactgaagatgctggcatatcctggcattcataggctctatggcctgaagcgccacagatactgcaccttgcgatatcaacaatgccaagagccaccccattaactaaagctaattgttcgaggccaagacgcttaaactcttcatgtttcgggtggaaggggtcgagaagaggctcgataagctcaacagccttttgcacgcattcttcacgatctgcagtgatgtgaacatgcataggcattgctgcgtcctcgtcagtctggtggtctctgttcttcccgtccttaaccgtaccacgacccctcaaacttatctgagcgccactctctgcctccaaacgcttgtgattacagcctcgaggtccaatgaccaatcccataaagttatattcagggtactaaaacataaattaatgccataaatggaatatagttaagtaataatttggaatagaatagagtaaatgataagtaaaatactttgtcgagtggaatgatgattttcctgacttttttgagtggtttgtagtcagctgaggctacaaatcctggtagattcttcagcaggaactctaccagcctgttgtactcctcattcattgaattctttaccctaacgtcacgagtgttaactctactgccgttcttgtcgtagacaggaggaggggacggaggcctaatttcagcgtctacgaactcaagttcgccggaagtaatcttgcgagcaagttcatcgtgacgctgctcgcggaggaactggtcaatttgggcaggagttagaccaggtgggaggtcaacgtaaggaggcggaaggaagggcttatcctcctctgggccccagcgacagccaagttcctcatcagatacgttataagctctattcgatagcattttcaactcatttaagaatgatttggtagaattgtgaataatcaatgattttccgtcatcaatcctcccccaacgcgtaaatttacgcttctcgctttttacagttgtcgccatttattattattaattaatgtatgaaatctgatgtggttaagaaattccaaaaggagtttaaaaattaaaatatttataaaatataaaataatacaataatagtataaattaatttaataaaaataaaataatttaacaatcataattgattaaataaaaatgttactggggatttgatgaagaaattttagaaattctaaagaataaaaacaacagttagatattaattaaaaacaaaaatcaaagtgttaggtaaataaaattattgtttttgcttaattggtgaagataaaactgatgttattgactaacaactgacttccacaataaagtaatattatatacacattgtagatagaaaatagtatatagtttgtataataatggagtattgctaggggataaattgggtataattaagtgccttttggtgtaagtggaagattacataaaaggaagtaatctattagaaaattagtagattttttttaaaaacaacctttattcaattgataattaataaaataaattaaattgacagatattcaattgagtttgtaaaaaaatgtaaaaaaaggtgtaatgttataaagtgggaaaaatgtatagattgagaagattagtaaaagttttatgtgaatttcgtcgctttctttattggagattttaatttttaatttatttttaaataaaaatccgcctaattcttacatcaattttataattgcatctctgctatcgtctttaacaggttaatttatcagcagagttttcatcagtttcaatgagtttggataacgttttgtcgcctctgtacgggctgaaagttggagattgacgccttccctctgtatatattcaaaacttcatcattctatgccgaagggttgacggctctggttccgcccatttcataccgaagaatggtgcaattgctcaccctaaaattgcacaatagcgtaccataggtatggaatcccaaccacctctcgattttctacaaaattcactaatcgcccaaggcattagtgaacgcaattacaatcccagcccttacaatagccatactaatgatgattttcattacaataatgttataaacgtaaataactgtgactttgataataaagaggttaaattatcccaatttgacccaaaacgatatcgaaatagtgatactatagataataataaattatgtgaagataataaaagattaaatgaagataataataaattatatgaagataataaaagattaagaaattgtaatataagattgtgtagaaatagattcggacttaaaattttggaaaaattttgtgaaaaaaacgagtttgattatgacgttgataaatgtgaccataaatctatcggattcaacaacagattgattagaattaaggataaaataactgaattaaattctagattaaatagattttccggtggattgaatagattctgtggtaagatttggaaggggaataaaattgtccaatgtgtaatattctggattttaacatatataattttggggcttttaattcctgttaacactgattttactgtcgagaacctttccgtgaccaaagcaagggtaaattctaaaatcaaaccactatttctatcatttgccaaggcctcagttgatgattctgtgtatgcaagttacccagatatgactttgggaactgagttaaaggtgccatctggcactgaactgagcagtgtagaggaagtttcgctgttggtgttagacgttgaaggtttggcttatagaacatcattgtcgaagaagctggtttgggcaacaagactcactgaggatttgctcagagttaagaaacccattccaacaaaacatcaaagacaacaaatgtgctcactagaagatattgcgcctaataatttaaataaaactaagatcatgacacatcagattttttcaaattcaaccttttctggaaatgtaaagtcgaaaactgatcctaaaactaacaatagaggaaaccacaatgctaatagtagtaatatgtttaacaagttgaaagcccatttggtaccgagttatgacggttatgtgtactatgttgatgactataacacgaagttactgcaagttcatgtgaaggatattgtgaattatacgccgttctacacgcctttgcttgaaggagtatatctagagggctcaagaaagtcgttggttatagctttggaccaggaaacagggtcatatatcacgaggcatgaccgcgaaaacgatactaagcagcctttttcatttaattacttgcccaattactcagaaggaggcagagaccaactgcacatcggagttacaaactggtcagtcaaagcctttactgagaaggaccacgaacacatctgggatttcgaatggcttgaaatcggttctgtacaaaatcaatcgaatcaaccacttttaaacgcacttaaacaatcgataagaatctcaaataaccgtattattttccaatccaacactatcaatattaatacaattgatgataatatcaaagttggtaatgcgaatgatagtgtggatgatgctggttttgatgggtcattaacgtttccatttccaataacatcagtgtattatatatataagagtaatcgtagcgggatatataccttggagttgttagaaagggtacacatcccaccaccaccaaactttctctacaaccaaaccaactcactcctaactgcatcaaataagctggttcacaagtcgctctacattagtaataacaatataacactattcgataagggtataaagaatattcatatcgataaaaatgctaagaatccaatcgataagagtatgaagaatgttcccacatataaaagaggtgtgtataaaagtagtatatataaagatggcatagaaaacggtatcatcgaaataggatcatcagtgataaatagaagtaagtttaaacttaatggcggaagtggattcggaagactagacagaacaaccgactttgtactaaggtggtggtggctgttaatttcctgggttttggcaatgatttttacacctattttttgggtttaccgcagaattaagaactcaagagctaaaatggcaaatgaattggtgacagaatggccaggttctcgaaccgatttgtcagactcgaaaagtgaactgtatgactcatcagacgagtcaaacccggacccgaacccagaaactctacgtcagagattcagagatgaagactatctagacgtgtcaattgatcgtaagctttcaattgataaattctcaatagatgataggctttcagatgaaaatgagaattttaacaatattagaagagtcagaagtgaagggaaccttgaactttcctcaattaatgatgattgctccgtctcggtttggatggaagaacgtagcctactagacgtgatcactgataatcgattcgaattcaccaagaaaattaatcaacttaaatcgcaaatctcaccaatagaggaatccccagatattaataccactaacacccctgctactactaaccataacacaaactttgttaatacaaataaggttaacattgttaatgcaactaatgagtctagtactaccaataaagttaatactaccagcaaagtattgagtgacgtgaataaagttaatgctggcggtgttaaagataatttgttggtgcgtgaaaatacagctgcaagctcggtatcagtggaggaagagatgacattgagtgtgattccgcgtaatagtgtgttgagtaaatttctggagaatggtcggtttttgagaacatttgagtgcataaagatgttagggaagggtgggttcggatcagtgtatagggcgagacacaagttggagcctggaaatccagtgtacgcagttaagttcgtccttttaaagctcaaatccagcgaggatttaagctccagaaggtactttagggaagtggctgcaaacagggatatttatagcaaacacgtggtgaggtactatacctggtggtgtgaggagccacactttctgccactggcacaaatgtcaaatccgcttcaaatggctgcaatcgataatctgcgtttccttatacagaatgacatactcaggtcagatattctaagcacaggtggctcctcaacgctgaagaacggcatgtataacaactacataaaggagtaccgagatatcatttatcagtatattaagaacccgcaacaagatgatttcgtcccctcgttttctcaaattgcacaaatgaacaaaaataaacataaacagtatcactattattactttatcttaaattaccaaatttaatagttaatttatcttactttagcataagttagactagttagtagtaatttagtataattatcgtaaatttatcaacagttgagcgatattgtataatgattgagcaggtttttgagtagctacaatgcgaatagggaaggatatattgatatgtatactgaggatagtaacattcaatttaaggatacgaataatacaatgcccaacactagcggtgtcaggaacagcgtcaacttcgaactggataacttgagacgtgatcgtaagctttcaatcattaacgaatatgaaaaccacaacaaagccaatgatcataaacagtatcaagttgttcttctcatactaatggagatgtgcaatgggttaactttacggcaatggcttgacaagtactacatcccttcagtaaattcgttatagcccctactgggttattagatttataatttacacagttatttcattttgaacaacttttaagtatatttatcaattatatgcttactaattatacttttattagttattagtatgacagcgtatgagtttgttaggactgataggattgtgatggaaaacgacttgagcaagagaatagaattcatactgtttaagcagataatcaagggtctgcgggacattcatcggaactgttttattcaccgagacttgaagcctgaaaatatattcgtagatgatggcaacaacctcaagattggcgatcttggactagtgggtttcatccaagaaaataactccacatcttaccaaccgatcaaaacagtacaacaacatcttctctccgatgtttcttatactcatttatacacacaattatatataaacagtattgttaacaggatctgtatacccaattatgtagtttattttacatttattactatttacataacgttgtaattatttgtaggctacacaagtgagtgtaagagggcaagttataggaactccaggttatacggcgcccgagggaggtgggaactgcacggagaaggttgatatatactcagctgctctgatactgttggagttgctgtgccctcgcttcagcactgtgatggagcgactggaaactctggaaaagttcaggaagaaccacgaagccccgcccttcattaagacccattacaagccctggtacgacttgatggttcaaatggcagataacaaaccagaaaacagaccctcagcagaccaagtctacacccaactcaaagttatactaaactcagatttttcataatattctgcacacattatttatcaaatataaaaatataaattattactgtcggcggttcagtgataaatttgttaaagtttagggctttctggaaattccgacgtcttagttgcttagtaggatgggataattaccttcatcattgattctatattataaaccaagtacttggtattcgatgtattattgatttgactgttagaattcggttttcatttagttattattccgaatactcatgattctggccatattatctgaattcttaaattaaactcaacttataactaatactatacgtacatatgtatattatcttcattttcatatcacattggtatgatgagttatccatcaagacttattaaagttagttgggtaatgctaagtatcaatttataattaatatatatattgatttgttaattaaattacatggtgaatgaaaaattactgagcagtggtggcggatgtgttattcacacctgaagcattgtgctggtttaaatcaattttcatatttggaggttcgttaggaatcactgggattgcgggcataggaactggtactggaggaaccggcggaacggggccgggcaatccgccaggaattccattcatcagtcctagtaatatattaataaaatagttaaataggaataacaagaggactaaaagacgttaaagataataccttgaggaataatgttaggaggttgcaaaggtgtgaatccggggaaaacacccatcattggaagacctgaaacgtgatttatgtccttaaaattaccagggaatataggaggagtttgtcctagaaaaacaggcggctgaaaaaactgctccctaacaagtcctgaaaaataatttaatcgatatatatttcaaaataattaattaatttgagtcaactaataaatctatcgtattaataataacctgagtaggtttaattagtatacaacatatagtaaagtaatgtcgtacgttgaaaatattcgactttagcgctaatatgttttcgaccctgggagtgttgttttctcccagcgggagaactatgagttaaatagatactgcaatattcgcagtaaaatttgggcataatatacaaatatttacagatttataaatggaataaaaacaattatgttgttaacattttctaaaaaataaaaacatactttatgtaatttattttaattatgtcactccccatttgaatatttttattcatcacgttatctagactatttacattattttaagatatttaattggcttcattactatttaagatattttaaattttaatttcataaaaattgtatacactcgagcttataaatttgcttttattgtgtaatcatgagaattgaagattctaaggagaatttccagaaatcattcatgttaaagctttcaaaggctaaaagatcactagtaaggcttacaaagaagacaataaacgtaaccggatggacagtttggataatcggtactgccgcagtgacactcgttggcccggtcatttttcactacgataaagaatgtcatctacttgaaatacaacatcaattattgcaagctcagcagtcggcttccgttccaattcttaattaattttatactaacgatatcattacataatatagataaattttcatataatcgactaatttattttataaataattacatttttgtataaattgttggtttggtggtaaaattgtttttttctgatggaatcttgacaattgggaattatgccataaaattacataattccaaataatgatcaaaaaattctgtataatttgtggttaattatgtaaaaatatgttatataaataaattaaattaatatgtgtaaacctttatgtctcttgattttcaaacgtctctcagttggatcaccggtttattgttgagttttatctatttttttctcaattttcatcattttaatcattttcctaatctcaattatctttaattttattttttaagtgcagtattagtgaggatttgaaaatttttaggctacacattacggatacaattaaactatacattatcaagatctaggattatatgtgactatacttttagtatataacttaaaatattaagttaaaagattgtaacggagtggattttacacatttgctccaaaaaataattaaataatactataaatttgtgagggtgtaagttactctgttgaaaatacttgattgaattagaatggatttaaattcggcaaaaagcgaaactcttgagttggacgaaaatgacttaatattggaccgttcatactccaagatatttaaggccacctattatactcgagatgaaatccctagggatcacttgccctatggtctaatatccaatcgtcagaaatatgccaaaaactcacctgaaagcaattcaacagataatgcgaaggacctagacattaaagtatgggctagggagatatatatagatgcaattaaatacattacagaaccatttcagcctgatcgtgtatttgaatggtaccatgatttcattgccttaactaacttacaaattgcctttcacaactactacagtcatgccgacaacttctttaacaatcttttgaccaaatttaataacattttaagttggaacgttaataaggaattaatcactactgacgaagaactggaatcgttatcagtctttattggaaatcagactagaaatttaagatcctatgtatctaaaaatgctcacttgcttatagagctgttaattgacactattaatatcgaccagtgtaagattttgtgttacagaattgtacctcagttactgacttcgactggttctgagaagtcggttttcagggagccttccataaataatttgagattaattgcgaaacgcttttctacgcattttgatgacaagattttgtggcagttcatggaccaaattgttaatttgaacaaaaaaatctcctcgactgcttctaactgtgcttatgaatacttaacactcactgacagtaaggaccttgacgacttggatttgagtaagttgcttgactatttcgagacgggtttaaactcaaagtgtgttgacgccaagaggggctacaagaggatacttgctaagatgtcagacattctcactgagaaaaaatacacttcatttctcaaagagtcgtctttaaggccaaacctagtcaaatttgtcaaggctgaacttccgtcagttcccagttaatatactataaaacatatacactactgacaacattgctaatattactaaaatacacgttaataatttgtattattttacattcatatttaaacgggcattcattggtgtatattagcgcttgtacatgttatgcaactaccattatagtataaaatattaataaactggcattagattaacttgacctattttcaggtcttttagtggtgaagaagggtagacccaaatatgtcttgatttcatatagtacacgcacagcctttgtgagggaaagcaccgtgcctaagagtgtcaagaagaccagaaaattctgtgaatatgggctgttgaacaccaaagcgtcgagtctcaggtcaaacagaactcttcccaaaaccagtagatatcctactacgactaccatgtaatggaaatagaactctgggtaaaacaggactctttctgagcgtctcaggttcgagataattatgaaaattattccgaatcctcccaaagtggacgcaaaaagcgagtaggaaacatgcaatttagcaggcaaaaaatcagtcaacaacgttggaaatacacaattaaacaacaaatataatgttaactctaaaataagattaatattactaatttaactgctagtaataattttaactgtactacaaataacaaaacaactgtataactagatagtataaaggtaaaaagatacttagagttttttttagactcttgtgtaacttgtacatttcatatgggaatccaaagaatgtaaaaaatgatctgaatccattattagcagttatttataagttatttttaactggataaataaatatgaatggaaagatacattgataacgcaaaatatagaaatgacgtgaagaaatccaaatttttgggtaacattttgagcaaaaatcggagtgacttatgctttgtcaggaatttagaaactggagacaaccagaagctcgggaaaagatagtcaagcatcaatatcaacaccacctataaccaacattaagcttgctgaatgtagggtagtagaaaactacgataattctaggaagagtattttatacccttgccctaaactatatataactaataaagttagtagatacagctaatagtggttctgaaactccaaaaatgaagaaactgttagtgtatgaaaatgttccgaaggtctcctcttgccaattcactgctgctgcattacacaaagccgatatgtttatctaaaacattactattacaggtattaaaatatctcactatacaataatcaactacataactgggtttggtataatttaaatggaaccaatgtgttaaggtgagagaatcctgtaggcttaactaagaatgtgaaatagcagaaaaaggaacagaccaatgcatcagttccgtggtctaaaagctgtcccaggggtgaagccaagcctaatcttctagcttgtataccgtcaattccatcaaacgtctacaacatatccatcaacaccagatgaaaaggatcatagttaaatatatatacaaacgaaatacaataataagaatataattaaataatctattctaacaacaagataattaaactatctaattatacatctaaagtccgccgaggggacaaatgtgtgttaccgtataaaagaagacgagaaaagaactaattagtgaagtccatttcggaacagatttagctttaaaattgggtacatagtaaaataccaaacaattcattataaaaacacacaatcctccaaacaaggttaacagattcgccgatatccactaaatcatcatattaattcagctgataactaaataaataaaataaactttaaaaatataacttaattttaataaaattttaaataaaaaagtacttttggaaggattttaactactggatcccagtagtatttgagcattaaattatcgagaaacgtgaagtttccgggtttaaatgtataatccttcaaggaaggaagttgagattcaggaattattcgctttaaaacagccattttaatcctgatatactctgattacaagtaaaacaataatattgtacaggttagttggtagatttagagtgaatgaaatgaagttatagtgaaataaccaaataaaggataaatgtaatgtaaatttacagaatgtttagagaagatgtggaagattcgatagtcagaatatttaattttaatctaacagttttgtagtcgtaggtgtgaaaaatgggttatctaacgactagttataaattaattacaaataacaaaaattattaaataaaaacctgaaattataagtatttgaaacatataaactccccacagattgtacttaaaatctcaatatttcctaaacttatggttttataaactactccctttattaaaccatagttattgtatctataaaattatgttattttgattatgggcaatctggtagattttattttttaaccttgaaaatgtgttaccaattaacaatcactagggaatgaaggataaagaaaaggaaataccttcagttcctacttcatatcgtattttaataaaggtaattttttaaaaattccttccccgcttgagattatttaatttttataccatctcattattattttatatacaattcctgtaataatgtattagggagcctctgcaaatgataataaacaaatacgtttaaatgtagatgataaacgtcatgtgtggcgtcaatgctcttttaagaatccagcaaggtcagacggattagtgttgaggcattggcgccactttgaaaagggcacagaatatctttcatcagccagaaaacaaaggaaagtcgtgagaaacaagatttgtaagaatattgatgacgattcgacctgtacacttgccagaattgatgaagaggattcagtacttgactcatactcatttgccagagtaaatccctctgttaaaatttatcgttactccgatgatttttatatgttccatttagccgttagtacattaattattaaactataagcttatattccaattacagaattaaataaaatatttgatagtatattttaaccttaattcaacaatatttatatctaatgtgttaattattatttattatttattgtatataatgtgtaggatttggacccatcgtggactaaggatgagactgatttgttatttgacctttgtgagatgtttgaactcagatttatcgctatccatgactgtttcaagtggcgcaaggacattccactggagaagcttaaacaacgttactatagtgtaacaaaacgtatagttgaattcctcttcgaggagaagataaaaaatgagattatgaagcacgggaacccgaatcatcccgtggtattgtcactgaaggacgagtcggcacgtcatcctctggtcaagttcacgtacaacgcagaccacgaccgtgatcgtcgtcaaatgcttgagcgtagttacaggatcactcccgagcaacgagaaatggaagctcagttgctgagtgacataaaagctgcggaatctctcctaaaatctgaagagaagaagagaagtgagatgaagagacttaagcgcaaatttaacgtaaacgagtctgaagtaattccaacacccagacttgaccaattccaaacaaaaccagtgtggcttgcgagctcttttatctcgttttacaaatcacaactcactcagcatcataatgacgctgtggatgaaatgctaaatgaacttaacatttcacccccagttgtttcttcacaagcctcaaatgaactttattggtattttccctaccagactatatacctaataatatgtaatagtatattaatagtataataatgtgtagcattgttcgaggagatgccgcgataatgataaacatagttaataaagtggagagcttacgtaaggagttggatcactggaaacagttgacaaatcagcctacggaacctgaagctgcaaaggttaaggaagaaccttttccagatacaactgatcatatgcaggtgtatcagacacccctcacacacagtgttattgctaagtcgttcactaaacctaaaccaacagtcggcggagtatctacagtacaacaagtacagcctgtgccaactgttaacccacctaccacagttggagtacatgaagaagatccgatgcagcagtctcgtcgcatgatggtacagggcatgcctcctcagatgaagggaatgtatccgataaaggcacagagtggtgctgcaagtccgcaggccttcacacagcaaatgtacccccagtttcagcaacaaatgttccacactcagatgaacccgcgtgttattcagcatcacatacaacaaagaatgatgcaacaacaacagttccagcagcaacagcaacactttcagcacatgatgccaatgcatcaggatgccaagttccaaccaattcatcaggatacaaaattccctccaatgcatcaagattcgcaaatgggaactccacaaatgccttcaggacagtacaacccaaatcaatatcaagctcaattctcaccctcacagcgctattaccaaacacataaccaacaaatgatgcatcacatgggactacaaaaaggcccaaacaccaatcaaaaataagtgacgataccgctaatcacagtgttactactatgtaattaccaaaagggttaaatcgccaaatcatgttttaaaggtgtatttttaacattgtaactgcttggattaaattataaacaagtaatttataaaatgtgtaaaaataatttgaattatccaataaggcgaataatgtaaaaatagtgtaagggatagcattctattaatgtgtttcctaatatatttacaaaattaatttgtcccctaaatatttaatattatgtaaattcaaatagttttattggtgaaatggccaagaggaagagaaatttggttttagaatcacgaaaatcagattcgaaaccagataattcactttatacctcaatttacggagattctaaagaaacaaattatttgtcatctaaaaataagaataaatctgataaaaataaaacaatcagtggaaatttgagggataaagactatgtatcatatctggctgagaattctggtgagagtttatcgttatggaagcaaagaattgaaaataaagttttacaccttaaaaaacaaagtgaaaagacaagtttagtcctgggagtaagtgctgtagaccattatgtccgtttgcccttttcaaagttcagctgcatcagtaatacaaagggtaagaaattagggtttttcacaatcaagagtgtgccatataaatatgctttggaatttaacaccctgtggttagaatacgcgaagaagttgcttggcagtcctaaaactcatttaaatgcctcaaaactagttgcgatgcttgacctacacggatcacttcttgaggtcgtcaaatccaactgtacgagttacgttggcgtcacgggaattgttctcaaggaaacacaaaatgtatttttcctaccattcctccatttatatactttcccacctcacttaaatatattatgagttactgatttaaatatattacaatctagtgatttaattacaatattgtttagggatttagtatagtggataaagaggacaaagttaggtttattttgaagaactcgagtgtttttaagttaaattatgaagagtggtccttttttatacacggaaaacatatcatggcttcggcttcacaacgcactaaaaacaaactaaaggataaatctactctctaacctttacaaattttactacacctgcactatagtatgtttttagttgagtattaattaatttaataaattaaatgcttgaataaaatattaactactctttatgtaaactccagaagccttaatcttttttcattgttggaaccttcttaatttgactattcctctggacatttatttcatttttgaacaatctaaaaataatttccgaaataattagtgcagacataatgaatagatttatagatcaatgttttaacctagagttaaattccacataattatcacacatgacatagtgtattttatattaatctgcaaagtaaatttttaattgatggatagttgcatttcgtcatggaccacgtgcgcatccaggtcaattgcgatgcagttttcaatagcgtaaatcagcctcttgtacataatatcaaggctcgagtacttgggcatcaaaagcctaaaactacatgttgccgaagtgggcaatctcttatccgcatcttcatcctatataaaaattaatgtccaaatataaaaaagtaccaaaacacaagcgtaaagtaatattaactaggtaaataaatggtatatttagttgaatattaactgggtaaataaatggtatatttagtttggtattggtatgaactaatggtagtgggagataccggtttattatcgtattctaatcttaaacaccaatcggaattggggtgaggtagtcttgatctaccagaaacaaatctaaggaaaagctgcagcatatcattgctgaatcgagagagaacgtcaaataaatctttcttgaggttgagtgagtatgagacagtgtgtgctctgagtactgcgagatctaccagagagtcgccacagacgacaaactccagagatctgggatccaaaagtgttctaagccttcctattggaaccactgaattcatccctttagccaggaatgaacagccgagatcgccttcagtgagcctaaagagtgttgcaagtcccaggtatttccccagatttgaaggtgatacaggcaaattagagccattttccaccaaatctaaggtatctccttctgcactttcaaggctaaatactaatccgttgagatcggcttcagtaactgcgccagtggactccagagctacaaatttctgcaacaaatcaacgctcatcttatcacagtccagtaaatcaatcagcttcaggttcgagcagagcagtttcttccatataattgggttgattgcaatgttaagggggttcatcatgcacaaacacattgcacaaagtcttcccagactctcatacatgctcagttccatgggaacgctctgactacatgagtccgagtaaagttcactggcaccacaacggcaatttgacccgaggtccttagaactcacaggctcatcaaaggggaaagttgacaatatacaacaacatccactactacaacaaacccccaaatcacaacatccgactgtaaatatactattggccctgtcacttggctcaaccgaatctctgcgaattcccctggcctcagttaattgactagtattctctgtgaacaagttacttattggataatgtgtgaactttattagaactgtgtcctggtgcattccatagttgtttatggtattttgacacttgattgttgcagattgtgaatcattatctggagtgagtgggaacataaactcgttagaaatacacgttaaaagctcctgaaacgggcctccaaaatctgttgaaccttcacctttaaaaacgaccataaatggcctttggttattttttgctctcaaaatgttaggattgcaattcagaatctgtgcagtgctctggaaccacaaagaattcctcaacagcttcgttgtatgtgcaatcccacggtcaactcgaactgaaaagtatggcctatccacgctcaaactaccgagtgtaaacatcttctcatacatttcatttaatacacttctcttcactaacggcttattcctcaagtaatctgtgtaatgtattggcatcatcgggcccatacatacactatatttcatcctattcaaacaattccaattcatttgattcaagtcgtcataagaatatctcttaccaatggtgttgttagtaggggatacattgctatccgatctatcaaagtcattttcatctagtttgatcccgtagtaatcttgaaaaccttctgaaatgagtgaattgattggcctgtactgtatcaagggctgatttagtatagttgatatgattggtataacatttctgaacacatctgagatgacatcaacgtatcggattcgatccgctaatattatcagcgataaactgtgaaatatgtaatcagagccaagatccctaccattccaatgaccaccactgtttgcaccaatattggcttccaaacctttattaccctcatttatattcactcttttcccaatcaaattgttttcaataaaattatttccaactaaactattacctagaggaaaagcattataatttacaactatgttaccgtcatcaactgaagtgtcattaccggcaactgtgtttatattattagcaactgtgtttatattattgggggatgtgtttatattattagcaactgtgtttatattattggcggatgtgctggtatgatttgaattgtatagtacattttcatctaaatcaccgtttacaattgcatcggtggtgttgacggttaaatctgagcggttgatattattattgaaaagatcgagatataggtgagagcaacctgagtttcgactaagattagtgtcatttctgttaattaggtgtggggaggagagtgttcgaatatacaaactttctccaattccttccaaatttatctcattatttggcgaagattcgttcataaaattatatcttaaattattctcgctattcgtacataatttagtgtcgactcctttaattttgtcaggattcgttactctgtaatttccaaactggattatatcgttcaccaaccctagcccttgtaataggcttacaatcttcatttcggtgttatgtttcggatcttcaactatttcgcagtttgtgtaatgatttaattgtttccacaaaactgtgtacattaggtgtagatccatatctgataacgggaatgtattcctgagctttaaaatcctacttctcaactcttgcacactgctgaacattgtctcgatgctgatatttattggggaccacaggtgtgaatccgaaggaggtaaatgtgctaacatatcaccgcaattcctagaatatatcaatatctttgccaaagtttccaattgattgtcactattctttaacaaatccaacaaacttaccaatgttctatccaattcaaaggacatctcactattcaattccattcttaatctgtcaaacatatacatatttcctccaaccactgtacaatcttctaatcctactccactatctctactgactcctaatctaccgttgacagtgtcgtctcctaatccattcttaccagtatccacactgtatctactttctatgccggatttttctaaagtgggtgtaaaattttcatcggttagagaattgtttgaagaggtgtaaatgtaaaatcccaggttgaaagagtaggaatctacaatgtgtaaatcttttaataattgggaatttcttcttaacctttgtgggaacaacaattccttattgacaattccaaaagacacaagtttattttcaaatcttacaaattttaacattatgtactgggtttcagagactatgctgagtccttcacattcagataactggttaaccaaactgttactcaaagcaataaaattcctcaaagcttcatcagtttcagaggcaatacccttgttgaacttgaacaagtgataaattataaactccttcaaggtcatatttaactcgtttgatactgatttcatcaaagggtttgcctcatccaacccacttgtcattttatacaaccctctccttattatctccaaactctcctctatatacttcattaccaaattactcatttgcaccgtatcttcatttatcatattattcaataccacctttatattactattcacaccattcataccatttttactactcaaactattcatactatttttactactcaaactattcatactatttttactactcaaactattcatactatttttactattcacactattgatactggtgtttctgatgctgtttatggagttggttgagattccagagttgaggccactaaatccagaatttttagtggaaaactcagtgcttgagtgtaagtgttgtaggccttcacttagtaaaccaatagtggtgttaaacccttccttaacatcatctgtcagtttacccaagaagttacccatcaactccagtatgtcagtctcatctggtaaatcaatcctcctgtcagggctcaaaaactcaggactactcataacaggcgtagccgggcttgaagtttcagagggtttttcaattgggcccaaaacactcggatccactttaatgttgtacttgacatacattttactagacatgaaaatgtgcaaattctgcagtagtgaccaatttgacttgtaaaaaacgcccttctgtagcttatatgcgtcaattaactttttgtgcaaattattatttcctggaattgagtgcaaagtctctgaaatagacaaacctctcccattcgaatggacatcagcgccaaagttcaacaatagctcaacaatcttaaagttgatctcttttgatctgaaaagtgagtagtatagacagttatgacccgaagaatcaactgcattaatatctatcgagtgaattgtgagcaggtagtagacgacgtggtagtgacctcctcggaccgcgcccattaacggcgtggacttgtagggcccggacttaacatcaaagttaatattcttattcagcgccatcaactttagcagtgacagcttccccaaattacacgcaatgtaaattggagagtacaaaaagtagtcatgtccatcaacgtcaaagtggtcatcgcatccattctcaaacaactcacacggcaactccagaaaactctttatctttgccaaatcatcaaatatcaccgcatttatcaaatttcttctatcagcataggtatatccatcgtccaaattatctttattggtagtggaagtgccagcaaggctggtgttagtattagtgttgctcatctcaatactgccaaacatgttatcacgctcactgtggtttggattagttgaggcaataatattatcagtgtaaacgttggtgatgtggaaataataagagtgaaagttaagtttaacagtttgtttacttactgtaaagtacaaactagactcttcagggttaaacgagactgagataacatcagtttcatagtacgggagacattgaatcttcctatactcgttatctttggaggggacgtggaagttagttgagacataaagatcaccgctgctgaaccacaaaagtttctcacggtcactaacaagtccaacgtagaaatttggcctgacattaacattgaagcccttttcaaacttgaatgataacctgaatggtagacatggatcaaacctcatgacttcgtcctccaaatttaaggaattagtacccaaattaacaaagttatcactcagcgttacaagacttgaggtggataagtctaccggtgtcacatctgaaaatgacacctttgtcctatgtactgataaacccgttcgtattgctggcctaaccacaaatccattccccaccttcaaaagaccgaactcattctcgtgtttcttcacgtaacagtttgtaactggtataaccaccaacgagtctaacttaacaatacacttgctcacgtcaacagagccataatttaatctattaacaaaaatgaagggcattaagtcttttaggtgcttgaaataagttgaagtggtgatggaattaatgtcccagaaaatatgattattcgtcatgtacatcgccacatcggcgccagttatcaatatataaacagttttttcatccctgtatactctgttcatattcatctccggattttttgcaaatgtatcattggtaaaagtggtttcagtagtgtatcctaggcagtaggtgtactgagggtccaattggagtagatatttaatcagtggtacattatttacatactcttccaaggggtagaactggcctattttaagttcctgagtccttggaggtgatacaatcaattctgcaagaacctttgaaaagtttttatattgtgaaaacacgaacctcgtagccaactcaaccttaaacttcaacactaatccgtgatacctgtctgaacaactaataaaatggacttcttcattctttcttccactctgtttactatttaaaattgttggaccacttttaagcattgcactatttttcctactaccaagtgtgtttttagccgtaaatgaagaaaatgagcccaaatcactcatttgagcagatttttcaccagaatctttcctcagattcgccgtttgtagtgggattgatgtgtatatttcaggcgttagtgataacaaatgggataacatttggctacttaacttcttgttacgtgccaagtataagtatgctcccatgttgtagaagtcagagtattccaagttacgagtaattgaaaattcagacactgggatagaattatctgcccactcacaggcaattacaaatgatgtcaggaaagagtggagtatgttggcggttgagagtctggtagtgtggtcgtgtcttttatgatcaaaattcgtaaacatatccagatcagatgttgagtaatagttgcatacgctgtggactcttaaaaatgaacaggttccaaaatacataatcagctccagtaatctgtccagttccctaacactcagtgatgggattactttatgagtaatcctggctgaaacctgtgaaagcttaggtggtgacccgacaccattcaggaacaaaaagttaagcaagcttaggctatatttattcgtaagtgcaaatctcaatgcgtatggacacagtgggtgtcttggcaaagtatcaagtacccaaaacacacactccaataacttcaagtaccgagttgaactcatcgaaatcgccatacagtaaattaactctgtaaacaacactttggccatggtattcctatcatttggatcagactcgttgacaaatgggtgataaaaaagaagctgccatgagtacaatggatcacaagctgctgaaaacaagttcatcctggtagcatccgaagtaccacttctacactcagtgtttgaatccgccagttcataatattccaaggagtttgaatcaaatgtagttgaaaaatgcaatatgctacttctaaacaagcttaatgtgttactacactggctcagaattttcctgtaaaagtaatccctaaacacgtgtactagtccttgcagaaggtcaaacagatcatgttcaaccagcttataaaactgcgatcttctcataaaatgacgccttactgaaggtattcttgaactagtatgaaatgatttttcacatgttccaaacatcttcacgttaaattctgagttcattgttttaactttaagccctctgttaaccgattcttcaatcaactcatatgatgcgttggtactataaattgcattccacacatccaccaacaataccaattccacaggctcaagcgtgttattatacgttctataagttccctaaaaaaaataaaaattatgttgcaaatgtgtaaactcgttacaacttaataactggttaatagtgcaaaactgaataatttgttaatagtatacaactgaataaaatagtgaatacttgtgttgtgatgttgtcgtagtcgatatgcagagattgtaggatggattggaggttagaaaaggttacgttttcaatggtgttatttgagaagaccaagtcatcagaacaagtggataaaaatgaaacaataaaattagtcagcccgtccagcaagtgtagaaaatcagcgttaagagcaccgataccgttgcttacaacggtggtagagtacaaatcaaccttgaaacagcggtgtgaaagtaccttgagtatgagtgcagaagcgagcagggatttggaagcgattgctataattaacgagtcagtttgcacatcaccgtgaatgaacctaattgaaccctttttagtagcagataaggttaaagttgaaattaccggcctcacagtcaggattttcgaaatactcacaaaaagatcaagcaaaagctcgtttggcaaggttactagtgtggttttagagggaaatgatgagcctaaaagaaacggtaaagtaaagtcggacacaactttaaagtccttctgggacaaattttcccagacttgtctatcatggtcacagcacaacacacatagccagctgaaacagtccctcactgaggactcaagccttgtgtacttaaagttactactcaacagagtatacaaatcatcaaaagacgacttaatcttcaaaaccaattccctttttagacctgaaaacatcggcacattcactgataaaactgactgatacacctgaacggaatctgaaaactgcgcaaaaagacacgtatacttatcatccctcaacaacttatcccaaaactcgtccttgcaaagtgttattggcgcctcatccagagattcgttttccacagtatcaaacttaacatcccattctggcacgttatcgaatgaaaccacatctgaatcttccacattaaaatactttgcaaaattaaacgtcaaaacattttcattcacagtaatctcattctgctgattcaattcagttaattcatcaatctccgtcaaatcacttgtaggataagattctgcatcttcagctggaaatggttctatactatttgagtgatcagaaaccggaattgagtgttccgttacagttcttgatctaacagtcgccgaagtttctcttgacactattctatccaaaaccctcactacttccacattactcgatccaattatttcattaccctgttccatttggacattatttctctccactgtctggacatttccttctctcacgtttctatcaactgtctggaagttgtttctctctagcgtttgtgcgttacgattcaattctctcacatttggatatgaattggatctgtcacccatatatcccaccctatcatttgattgtaaataatgatttctttcattgggatttaaatagtgatttctatcattgagatgatgatttctttcactgggattgacatgataatttctgtcatttgagtttggtatttctctcctgacattggaggttaggaatgtgttgataatgtttgactcgctcagagtgccagtattgggaccaatattaccgcgttccggattaagacttgagcctcttaatacaagagttgctgggtcttggaatatgaacaccaatgacattcttcttgaagggtcattttgtgttatcgggtcaaagacaacttcgagtactgagcctatagagtttccgccaattaacagctcagttctgagacatagttgtccgtcatcctgatgatctagtgtgaagtgagcagttaaaatgtcgccaattgtgtatcctattgtggctgcaaataactgagacgtgaagctgaggctatttgagtgagaaaaccctaccacgtcattgcgctcaaacaagtctgatactgtaccaaacacacaatctgctggcgccaccgttattccaaacctgctggcattgaggatgtaaaagtttgttgtcagttgcactgcagttgtgcccagggttgggggtatcctgtacatcacaattcctcccatattattcgctctaataacctgtagtgtattctctgaaatgtcagcctcaaaatccacggaattcctatgagttacaaagtgatctgaatgaggcaaggtcacaaatggatcattcggctcaatttttgtcactggcttaaaactcttacttatcagtatcgactggaaattttccctcaatgttgcgtagatacactccaaaggtacttgtttcaatggcggtaaccattttagtacaaataccgcatgtatctttggtgatgccaatactgtcttcaaatatccaaacccagtcactccaaaattgttcaaattcccggcagtcctagcgccggtggtgcgggtattaccagtgtgaccagtaactttaccactagtgacacttctaacaagactagtggtgtgagaagtggctgataattgttttattgttacgactaggaggttacagaacctctgtcccaggcaatccattgatagaaatgcctgcgcttgtctttcgccgagtgtaaatgtggtcagcaaactgtttaaaaccaggtatataaggttatagttttcacatgctcgcactaggttaatgagatatgataatatgttaccccaaaagaagtccagctccttcttgtaaatctggttagttgaacatgatgaacagcctctcgtcaccaacaaattatccgcagtattatcagaatccacaaggtacccttttattgttgtggaatacttaaattggcaacttatattactgcagtggtactttatacttactttttccgggttatctttacagttgcatgctgtactcaggttaaatatctgtactgctgtgcttctcaaatacttaaataatatccccaataccaatcccacatctcccatcttactgctactaggcccactgtgtaaatcaattttaccactctgtacaccatttgtgtgtagattagttgaaagttcaacccatagtaaatattttaatagcagatacaggttggacctgacaacgtaaaagtagtctaggcctttaattcccaagacttgtgtccaagtgccatttactccttcaatctccaaattacctcccaaataattcaccagtgaaagctcaatctcgtttgtgttcctattcgtaatattcttaggcaatgtcaagtacactgtgatgtctctagacgtgtttataaccaacgcaatattattactcgtacgcttactaagtgatacttctgatatcaaatgccaataattctccatcctccacattattatatcattctcctccaagttcacatgccccctcttattcaacgcactcagtgacgtaaatgagcttccagcattaacagagttactgttactagaatgaacagagttattaaagttactatggtaactagggttaatgaggttactggggttactagaattactatggttgatagtattatcagtggtatctagtgtgtttgtattggattgatcgaaattaacgtcgaaattgtagatgaggtagtgtccgagtccgtggctggtgttttcaattttgggaaagctccacaggtgggtgaagttaagattaattgggtggtcctgtttaagattttcggatattttcgaggactttttaaccatcagataaatagttcctccgggtaaaatcagctgatctttcctggtgaacttccgcatcttcaggcagtggaacaaattctcaacggtttcctcaaaattggttacaaagtggtctgagacatacacaaccagtgcaacctctaccgtgtaacatgaaagacttgtctgattagccatggcctttttaaagttcagcagtggaagtgggtgtaaaatagacatcatataattgaaaatctggtaagaatacctcgtgtcagtcatgggttcaagccccaaggaatacaccagtgaaaaaaacgataatgaaattcctagccaaaagttcatattcggtctattatagtttgtggagtctatagttgttattccactcctaatataccaatcacacacattctccaaaatactgcacaagtaatcatagaccacccggttgtaaatgtttggtacatactttgttccatttaccaactcaaactttgaatccttaaacgtacataacattattggcctcaacttgttgatcattatgtaccagaataaatccaacgtatcattcaaattcttcacattactcacacctccctgattcttagcgctttccccagtggtaccagtgttaacgagtaaatccacaaccagtggtgaataattatgtgtgaatgagaaattaccactaacatatccaagatccagaaaactgtaaatcaacgcctttaaactggatagtaatgatatcctaaccagtgatgacagtctgtgtatcagaaacctcttctcacactctaatcctggaggcccattcaatataaagtcaaccaaatcggcaaaattatcccccaaggtatcagcacccgaactaaaatgtgttctatcagatgccacggcgttatccacgtcaaagtttttgacctggcctgaggttaccaaaagttttgatgaatcttgtgaagttttattgagatttgttgaggaatttgaccttctaaatgcagctcctgaccttaatctcgtcttatgatctaccatattatatgtactcgtcttcatttttgatactgttctacacaaattctcacgttcacccgttatggagctgcttcttcccagtgttctacctgtagcactcgttgtattgtggaaatctgaattttgtgaaaagtggcctgaggacgtgttcttaattaaccaaatacatctggatgccacatcttctaaataagtttctcttaaactatctttattctttatattctgcatcgaattcattgcctggaacttgctcaatatcttcatacaaactacgctggcatactttttcgagtccagatactccataaagtgcgactcgtactcgagagaatattccgagggatcggcttgggagtcttgttgaattagtaagtgtgtaaaaagtgctattagggtatatctaagcgcgactagacgtgggtagagctggtcaaaactgtccgaaaagatctttgtggcccaagactccatattcagtaaccctcgagtcaaagtcccaagccccaaatctgactcaaaatcagctgaatttgatataaaagactcaatctcaggcacattcctaaatgacacactcgttcccttgacgtacttgaaatcttgcaccagtaataataatttacgtagcgatccaatcatctcaagttcagattcaacgggctcagtaatggtgtcaatattcccggcagcagtagaatccctagcagtagcatccctggcagtaggatccctggtattaccgtccatgctagtattaacacggaccctaccatctagtggtacgaaggtgaaattaagagttgacacgatgcatttgggaaatttgaacttgtaattggggtcttttaaacagttagagtccaattcgtttttatctagtgaaaagcgttggcgtgttttcagaatattataatccagagtatccacgttttcatacacgaaatgcacaatcttcatgaaaatcagcaaaaggcttgaaaattgataaattaaataattcataaacggggtaaacttttgatactttgcagaataacatcgaaagattttgttgtagagcaagagtacttttatcagatatggtaacaggttaacacatgagagtgtcacaatgtggaacaaatacttacttgtagtcctgatggattccataaattctgagaaatatgaaaacaaatccagcaacgacaaacaacttataaaattatgtaacaataggccaaagtagtccagcaaatactttgataacaaatccaccctgccactaataatatacaagatgtgctccttcaacttcagtaaatatatgaaaatatcctccaccaacactaaattactcggctcaaacagtgatgagtaatattcttcaaatatcgattcatctacgctacttgaatcagaatctgattccgaatccgattctgagcttgacccactcttggccctattatacctcgagcagaaggagttaaataacataattgtaatcccatgtttaagtagaaaccggcataacagcattgaaggtcttggaattgagtaaaaagactcactactgtacaacttggtcgtgtgatagttaagcgaggaaattgatgagaagtagttaaaatacttccttaaacagaatgtacaataattaaacattggatccaacaatgataaatcatttaaccgcgaattacacgtgcaaaagttataacaactggccgtatcacactgtaatgataacttatcagcttcaagtaactcgtgtatcaaattccaccacatgttcgttacctttgacggatttgtaggtgataagttagcggaatttgatgataatttagtgaccttggttgttccactctttgaggtttgaggttgatcgaaaacttctgataaagctcttttggtgaaaatttcaatgcacagtccctgattaagtgcgtttagcgtagtattctttgtcagtatggtcaggtctgtaacaaaataagaagttgtataggcaatgttgaccaggatttcggacaagaaatgtgtcggagaagtggagaaaagttgttttgatatcagctgatttgagcctaagatgtccagtgatatcaaattaacactgttagccagtgaaatcaagtcaattgggtggtgatattccttaaaatctccctccaaatcaaagtgcgatttatacttgatggactcgaacaatatctttgtcaggttattcagaaataaaagtggcacttcttccatagtaattggcagtgaaaaaaaaatcttcaccacggacagtactgagataattgattctgacaggtgtcgccagagtgttaccacgttcacatatcccactgaggaaattaagttataatcacagttaaacgccgtgtctgataccagctcaaacatgttcaacaaaagttcaaacataatattcaaactttcaaacgccttggaattcagcgggttaaatgagttttccagtgagatgttaaagtttacatttgccactgccgtgtgtacacttgataatgccattgaaaagaacgaaaaatagtcaaacactcttctaatataaccttcagactcaagctcagacctcgtactctgtacttcctcactactactagctacaccactactgtccagggttatagtggtaaagttgtcgttggtaatgaacatgtggtggtggattagatttgactggattaaaaactttctgaaacccggtgatagagttgaaaactgcctgacgttaacattttcaagattatagctgaagtcaagttgaaagaagtcaagtcgcgaatctacaaattgtatagtcataaagtatatcccattactgaacacactaactgttgaatcactaaacaaaagttcaatggacaaaaaccttgagcctttgttaaacaatttcattctcccgtcagatacgcctgtgtggtcagagcccctgctagacctaacaggtcccgtgttattacattcagtagcaaagaaaatgcgaccttgtgagcctatcaaaaacaaagtcctatcaatcttattatggttcttaatgtacaatttgaagttaaatgactttatcttcttcatgtacaatttgtctacgtcaatgcggtccaaaatctccacatcaattcttactacgaaattaccaatttttggaattattgagctcatctctttagtgggagaattatcagttttgtgacttagaatcgggtactgaagggccaaatattcaaaggctgaaactgactctaaattcgggacagtcgggataaaaatattactgtagctatcactggtgattgataataactctgaggtgtaattaatatttgagggccacaaaacactcttgaaatactttgtaaaactctgtaataaagagcagaaatccgggttccttatcgaaaagctgaagatcacatcaactaaaagatccgtgagtgagaatagtttattattaaagctaaagtccaaaactgagttaaaaacattgtaaatgtactccaccttcgggttcgcattcactgtatagctttctctaaataacctaatccagggataataatcagactcgaaagcctgcatttcgtccaaaatctccttaaacacggggaatatagcggattccacctcactagccgatgacttactgaggttaaatattcgaatattcaataacacatcgtgtttctcgagtgtcttgtataaacttgataccaaagtgtcaaatgagtttcgttgggttagtttcgactgaaatttagcagtttctaatggctcttctttagtgtcatttgggtccagtgatagcgaaaacttgtcaacagaatttgaaactgataatctcttattaaatgagattttctctagaaactctgttctatgtttagtaatctcgctgtaaacgtagtagagtgtgggaaatgcgttgtttagtctcagttgacttgagagtgagggatcaacttcctgattatacttggccattaaatgaaattcgtgactgtcaaataggaaaatttgataaattatgttctggtaactgactaactttgagaagtcatagttatatcttgacttgattaggttaagcgagttttcaagtgctaaatactcattggggtcatatttcggattttcagtatcatttggcggtacgcttcttctaaacatgttatagtctatggagatactcgtagaggtttcagagggtaatttacacttcccacagtggtcagtgctctttttaaaaaatccatcatactttttaaactcccctaaaaaatttgtatactccttcaaagcagactttgatatgtttattcttcccttttccttgtatagatttagtaatcttgatcttaacttgtgtatagtccgatttgaaccctggagtatcagaaactccttcttctcatccacattctcaaccaactttaatctgctaagtgaggtgtgcttggtataaacaagcagcttaaacaggtcgttaggactaatttgtgaagtttcatccgagtaatttggtaaatcggaggaaaatgaagtatcgtttgaaaagggtggatcggtgggtgaaggttccgaacggcctttagactccatgtttatttactaaatgaatatttctactgcgttatttgacgaaattggctgaattgttaaacaatgactttttggaggaattaagataataaccaagggagaatacaaaaaattcccgatcattatttaaacaattacagaaaagattgtgaaaatctcaaatttacataagttaacggttttatatttggaaaatgacaaaaattacaaaaatcagaaagcgataaaatttttaaatataaaaataaactgaaaataaactcttgaaaattctctactaatttgacaatattatataaatgataaaaaacagaacattcataaatctactcaagcaagcatacagatgtgtggtaagcaattttacgtaagttcattaaaattattattctttttataattaattgattttttaaataattaaattaagattataatattttaagttataattaactttattcactaatttgttagtgtattaaggagttcaattttaaagatattactgaatctcaagctaactacatatatacattttctataaaataagtaataatataatttggaagtaaaatattaaagatatattctgtaagtatttgtatctacggggtcgaacttgaagcttttgtaaacgcgttcggcgacggggttatttgaggttaaatctatcctattacactttagagttgacttacaaaaatcaattataaaagataacatatgagtgaaaatgcctttgtttctatattgaggatctacgattactcgttccagccgagaatcaaataatcttcccaaatgcggcattaaatatatctcaaaatatccaaccgcctccaaatcattcaccagtgaatccgattcatctgttaaatctgatttatttgttgaatctgattcatctgttaaatctgatttattggttgaatccgatttatttgttgactcgagtagtattaaaaaagggtaaaaaagtggatttgagagcatattgtcgacgtattctttggagtgatagatgtgtgatcttgaaacttgttctacgagtggacgaaccttcagatattcttcataggtttccaaattcttaatcaccagttccaagccggaaagggtaaatttctcattataagttactttactcttaagtaatctcaactgtaaatcagatgattcaacatctttactcatctgaaattaaatattaaattttaataatatctttaacgctaatttttgagggaattaactgcctttgtatgattgggaaatgagggtaaaaaattaaaactcatagttttcatgagaaataataatttctacattaatacaacatcaatttacctatttaataatttatttactcggtactttgcaccattcgttggaacaaccttataaacatatacacataaatttccataattaattaagatagtctatatactagacttttgaataatttaattgttaattattgtatatttatgtctttcttttgttgtttgtgagaagaatccaacaatttccgtaacttcaaatgggtacacatttccctgtaatccccaaacatctcaactattagttttagcttaattcatctgaattcaccgtaatttatcttaatatcataaattttcccgattgatgcgaatatttgatgttagaattgggaaaataattttattgatattgtataatattagtttcgttgtttgtgaagtggaatgcgatgatgatcataagtgccaagaaggatcgaaatgtgttaaaatcactttaggccaaaatagttacaatttatgcgtttgcgcccctggattcacaggctgggattgttcaactcctatcgattactgtaataaacactgtagacccctacaaaccggagtttcctgtaaacacacactctgcaatcaaggtaacacatgacttacccatttactcctaggacaatgtataaatttggaggagagtccctattatagatgtgattgcggtgcattttataagggcgagaactgtgaaattgaggataacccctgtagttatcagcgtaataatccttgcgggaacggagattgcgaattcgtacccggaatctaccaaatcaactgtaaatgccatcccggatggaccaccacacctaaccaaatcaataccaaatatacctggaatggtgtcgatgttcacatgactccaccctgtctaggtaacacacacactataccaccatacattattaactactattaactatattatattattgagtgtgtaagttattgagtgtataatgtgtttagaggaattgaagaaaggaataactggtagtgctccgatacttggcccaagtactgataaattataaaatatttttatagacgctaaggtagcttggtacgtggttttaatagtttcttgtattctctttgtatggtttacggcgacgacactctatgaattactcgggaagaaaaaagactcgacctgaagagatgaaacactccacttccagtcctaatcacagtaccaattctaatcacagtaccaagtcaacccccaggaaaaggaaagataattcttcaaaatctaaaaattttaacttttcagtcaagacactaggcggaaatttgagtacatccgagtcaagtttagctccagccagttcgagtctggaccctgatccagatgaatgtgcgctgaggtcatccgaagtgatagataattttaacttaaacaatctgaaacagctggagcaatgttatttccactgttacaccggaccaaacacacaaaattatcaagatccaaattctcacgtaccaactcttagaggaacaaagtttgtgagatcgaagtttggtgtgtcgacgaagtttagaggatcaaagtttggggaaccgatgtttccagcttttgagatgggtgaatcagatgtttcatcacaaaactcactattaaatgatgtttggtttgcggagtttaattttccggttgatttggagacttttaaagacattgtaaccgatgcggccaggtcactggaggaaaaggggccagtgcctagagttaagaaaacgtttaaaagtacaatttttgatcctgaaattggtcaacacataacgcacattaggagatctagcactgattccattagttcagtacggagtatccgcagcagtcaagatagctcacacctgacagaggttggtatggatccaaccaccgacacacctgtggatacatctgtggatacagccgtggatatgtctgtggatacgtctgttagttcagctgcaagtcctgaatttaaaccgcacagtgattcaattaactacttccccgacactgacgacagatactaccccgtaaccaaacgagccacatcccacaagaggaataccacacaacctgtaaatatagccaaaaattatcaaattaatgatccaaacacacaaatcgcagactccctcatcccatctgacacgctcatcccatctgacactctcatcccatctaacactttagactcacaaactgtaggtccattgactgtagacccagaaactctaaactcatctaacactttagacccagtgactctaggtacagtgactgtagactcgggtacagattcgttaatggcgagaggttataaatcggagggaatgttgtataattatgtgaagcctaggataaaggatgtgtcatacttgaagagtgatgggtttaagcaagtgttgtcgaggtgcccatttttaaatgggcctaacatggacaataaaatcgcaattgataaatcacgcacagtcattaaaaaactactcaaacagcacaatcaaaaacattacgaagataacaaatatcacttccaacccttcatcggtacaacacttataccaacggacatacaactatcacattaactatcacattatttaaccattataatatttaaccattataatatttagctaatataatatttaaccattataatatttagctaatataatatttaactggtacagtaaaatatgtttgagtaggagttcgaaggggaagatgtgagaatgagatattggagggggtgaaccgttcattatatcacagatttacgagttcagatcgcaggaaattgtgtaaaagcctaatgccaagaatttataaaaaattcaaaaatctcaactacctacaacactccgataaaaaaactctactcaaagtactcttcacttctgttacacatttatcacttatttactacgtaatcatttgttatttgctacgtaattacttatttactacgtaatcatttgttatttgctacgtaatcggtgaataattgtgagtaattgatgatttagaggatgaacatggcgattgataattatttatcaatttgtttatccaagaaaaagtgtaagttctcaacattaaacctctattttcagacgaattcatctttagtgatgattacccactcactcaagaacattttcatacacgtaacaccattaccatacaaatactataaccattactatatataactataataatataataataataatgtgattaggaggagtgtatggtggagtgataccatggcgtgtgaagtatgtgagtggtgagccatttcaacttttaaacttcacgaatcatgcaacaaacatcggacaaatcatcaaacaaataattaacaactaatatattattcaaactttacatttccatttcattcccatacttccaactgtgtataccattggtatttcatttgtaaacttcaatctgtgtatatcatatatcattggtaaacttcgaatttggtgttgatgagggctttttgagagtcagaaaggtgtgaaaaaatgagatcaagtgattttttaacgggatcctcaatttcctttctaccacaaacaaaaatactacaccttccacacaacacctcacttaacaacgtttcattcgccaaaataccatcctaaacattaatcataccagttatatattacagtattaatatattacagtagtaaagtataatagtagtaagataagatagtggtaagaatacttgaacgtagcatttgggagtattggcttctctggagaagcaaggaattaaggtcattgaatcgccaaataacttttgatagtgttcaagttcactcttgtataaaaatgttgacgcattttgtataccaaaaaataatactatccttctaacaaccggaactaactcttttttacccagtgttaactcatttttacccagtgtcaactcaattttattaagagttgacgtactgttggatgtttgattcagaatagtcttgaggaatgcgcggaagggtgagatgccagtcccggtagcaatgagaattaagttattactcttggcatcttcctcggttaagattaattccttaccgaaaggaccggtaagatcaacggcagtgcccggttcacaggcggataagaatctggagcaaacgccgagattatccttaaaaggctttgtaactcggatgcaaattgaaagtaaattatcatcacccgtcatcgacggcgcaagcgaataagatctcggcacatgacgccgattcgtactcatacacagccctaaaaatttaattactgaataattattgagaagttagagaaataattgagatgttaaataattgagatgttaaataattgagaagttagataaataatttgtagagctgtgtgagtgttacctggaggaatgacaccgcagtattgtcctgggaggtaggagtattccccgcggtgatcaatttcaatgtgatagaagtcacgatccaagttattcgtgccaattttccgtaccgaattgatcctacacctcaacggattcctcaccgtatagcgcctactaataatttttacactattcacattaactcacggggtagctgaaggttttaccgtatcttttgaggtatctaaggtgggatttgagggttttatggtgtcatttggtagtgttaaggtgtcatttggtagtgttaaggtgtcatttggtagtgttagggtgtcatttgatgtgattagtgtattggtagagggagatgagagatgatttggagaaagagaatttgatgaaaaatgtgtgagaattgaggagttggagtgaaatttgtaagaatgggaaaaaactgaaaatctgaaaaaattaataaattataaattttaccttagaattagaacccatttgaaaatactaaacattagccaaatgataaatatttatgattaaaccaatcataattaaaattattatctcaattaaaattattatttcaattaaaattacaaatatgttacattttgaaaaattaatttatttgcccatggaatcacaacttacactctaaattacccactgactatataaaagtgtaaatatttgtaacatataaaattataataatttaataatttgacttgagctaaattatggacgggaataaagaatttgataaagttttactatccaccggagaaacactgaccgttccaattataacccaggaagatgaacctgatgacactgtagtcatagaaaaggtacaaaatgtttgggggagcagctccggcgcaggtaccaattctacacaaattttacacagttacacaattatacagttaaataattatacaattttacaattatacagttacacggttaaataattagtgagtaattaaaatgtgtgatgtgttgtgtagggagtgactttttggataagtatcgtaagggtaggaacatagagatgcagcgtttggaggagatggaccgtaggtggcaggaggagatggagaacaagttattccactctcagaggttacacaggatccagaaggaaaatgataaaactatgaggagaaaattaaaaagagataaaagaaaacaaaaaaatataaagaaaattttaactcaagctgagcaaacagaatttgacaattttaggcctgaaaacgagaagttggaggaggattctggagaagcaaaaaggcctagagacagtgagtctgaaatcgagtctgagagggaaactgaagccgaatgtgtagcagaaaatgacccagagcgtgagagagaatctgtaaattacctgaggaagatgaataaatttataattttagataaatctgaagatttttaaataaaattaataaaattttaatattttaataaattttaccgaatttgtccaatttcacgagatacaccagatctatttattcactataacaccacttagacttcgcatccacactcacaaaatattttcaaatcgctgtaattttattactaatctcgtaaattattgtaaattctattaatttattgtaaatagtattaaattattgtaaatactattaaattattgtaaaattctctaaaaattgtagaattggtaaattgtaaaattcttgaaaattaaagaattttgtaaaattgttctaaaatcgtgaagttctcaaaaatcaaacaatctctctaaacatctcttaaacactccctaaacatctcttaaacactccctaaacatctattaaatactgtgtaatatcgttaaatacttggaaagattgtgaatacttggaaaaattgatagtgaaaatgtctggaattaggaggaagttgattagtttgattggctctggaaacattggcgggatcatgggatatctgtcacaactaaccgaactggcagataccgttttcttcgatattgtccccagtacttatttactatagtatatactatacttatatagttaactaaatacctatagttaactgagtagtcagttgactaaatagtcatttgactgaatatttgtaatgtgtttgtagatattggcgctgggaaatcgttggatataatgcatgcgaattcgattcagggaaaggcttacaaatgtaaaggcaccaacaactacaaagacatcgccggaagtgatgtctgcatcgttaccgccggtgtatcccaaacactcagttacctcataaactatagttaaatatataattaactccctaattatataccgaatagcctagttgatagtatactattgacagtacctcctggtacacggttcgaacccccctacaacaaattctaaaactatcatctccataacaatagttaatattcaataccagtagttaatattaatagttaataccaatagttaagagttaacactaaatacaaatagttaatagttaatgtatggattgaaaatatagttggcgaaggctcctgcgaaatcgaatgaggagtggaatcgtgacgacttggttgcgtttaacgctaagataataacggaggtggctgagaatataaaaaagtatgccccaaaggcgtttgtaatagtgattacaaatccgatggatgttatggtccacttaatgttgaaggtgactggtttttcaaagaacatggtcgtgggtatgggtggcttattagactcctcgaggatgaactgttacattgctgagaagttaggcgttaacccgaagtacgtccacggcagtgttattggcgcacatggtgatagtatgatcccactagtgtcccgctccacagtctacggcataccaatcctcgactttgtagaaaaagggtatctgacccatgaagatattaaggagattgaggaacgtaccattacctcagccattgaaatactgaagttgtacggctcaggatcttcttacttcgcaccggcaacggccgcaattgagatggcctcggcctatcttaatgataagaaatctgtgttcccgtgctcctgttacctcgaaggacagtacggacataaagaagtctactgcggcactcccgcagtcattggcgccaacggagtagagaaggtactcgaactcaaactcacaccacaagaacaacagaaattcaatgactcaatcaaagaaatcagacgactagaatcactcatcaaataatcccttacatgttcacaccctttacacctttagttatcgtaactattgatttatgttagttatcgtaactatgttatgtgtttagttatggtaattgtggagttagtatttaagaggttgggagtggtgttaccaaatgtgtttggcacctgagacaaaattttttaataaaataaattttaaatataaaattttaaatataaatttgttaaaataaattttaaaataaaattagtatttgtatggataagttattattatcgataaagaagaaacgtgacgatcttcagcgtattttggaatatttcgtaaatttataaataaatttttagagctgaaaggtgataaaaaatggataaagagagcggatgaagttgaaaagaggaaattagaagcccaggaacaactcgagaaacaaaaccaactcaaaaaaaaattaatcaacgataatttcaaagtttcttccacatcataaatattttattttgtagaagattgaggaattttatgaaaccaacacaaatctcgattcaacccatgatccaactcaaggtatcacacataccatcactataccatcacaaatactatcaatatactattattatactataattatgccatgataatactgtgaaaatactgtgaaaatactgtgaatactgtgaatgttgtgaaatgtttagatgtgtctgtggaggaggtggtgaagaggcttagaaagttacgtcagccgattgtattctttggcgaatcgcataaggaaaggtaaaagaataattaatattacgtttcaggtgtcggagattattttctcaggaaactgacatagatgatttagaagctaatcagaatatctacgtcgacgctatcatgggacggtattaaccaaacaactaatatttaccctaggaacaattacctcatctccaaatacacacacaaaaaccgtatcaccctgctctacacactatttatatattatctatatagtaccatagtatagaattagtatagaattattaagtgtttgtatactattattaggtattaggtatagttatagtatactacttagtaatagtgtaaggagtgggtagggaggctcgaggaccagtcaatggagtaggctggtccgagagcgaaatttttcatttttgctgctcttttttcctctccaaatttctcactcagatttcctaatttacccattattccatttattataccatacaatagttgactttgtagaatcgcaactggacttctttgacgatttctctggattacaacaagattctaaacactacaagtacaccaacttaacacaacttactcaatacaactttctcaacttacttaacacattagttgacacaacttaattgggataattgtgtagagtatttgagtgggtttcgcgtatgttgcgtgagtgggagagtcggatagtggagtcaaagggtgatctaataaaagaggggaaggaatttgaggctaaaaaaaacgaagcgatgctagtgcagacgaaaaaagatattaaaccgctgcttaaactaatcaaatccaacaaactagaccaagaaatcctagacaaaatggaacaaatcgtcaatcactgcaacaacggacaattcaaaaaagcacacgacatctacatgctcctagccatcggtattcacaccaatctacactctatacacttagttatacagtttgtacacttaattatacactttatacactttaaatacttaattatatactttaaatagttaattatatagttaattatatagttaattatatagttaattatacactttatatagttaattatatactttatatagttaattatatactttatatagttaattatatacttaattatatactttaaatagttaataaagttaattaatgtattaggaaatgcggcgtggccgatgggagtgacgatggttggaattcacgagcgtgctggtaggtcaaagatcttcacgtcggaagtggcgcatatcctaaacgatgagaccaccaggaaatacattcaaatgttcaagagactcatctcattctcacagtccaaatacgccaaagacccctcacaaatcatacaaatctcaaccaaccacatttaaccattttttacttagtttattcatatattgtgttaattatgttaattgtgtaataatgtgttagaagtgttgactatatgtgtggttggaaggttaggtgaataatttggagaaattttttaaatgtatagtaaattgtttattttcgtggaatcttgatattttgtaataatgtaaaatattttataatgtaaaattttgtaaaattggaatcttgtaaaatgtagaatattgtaaattgcccggcaccggtaaaaattgtagtagtaaaagtttaagtttataaagcgtaaaaatgacaagtcaagagctgaaatctggacctacaacctcagtagaaatcctcacctccaaagacgcctcctccttcaaaaccatgatggtaacacttattcactcatttttcattcatttattcatttatttattcatttatttacttatttattcatttatttatttattggtttgagcgaaattatgtaattttaacacttctgtggcctaaatttggtcaatttacgctcaaatacttaatctattcccataactaagctaaaatatattaggagttataccataataagagtcacaagaaggctatgaagatagcggaaacgttgctgtcgaggcacccgaaccacggcgagactttatctgtaaaagcattactgatgttatgcctagagcctacgcgtgaggacgagatagtagaagtggcaaaacgaggtttaaggaacgggataaacagttacttatgctggtactcgctgggtgtggtctacaggcatatcaaaaggtataaagacgccgtaaaatgttttgtgatggcgtttaagctggatccgcacaatgacagattactgagggaaatctgttgcctggagatcgagttgaatgactactcggggttcaggaaatacgcgagtgtgcagctgaagctgaagtctaaagagtacagggaatgggtaatatttgcgttttcgcagcatttgtgcgggaacctggcaattagctgtgagattttagaagaggcagataagcttttcatgggcagctacagagtagatgacctggaactaagcgagtcaatcatgtacagagcaatgctatacgaacacctgggcgagtttaacaagtgcacagagctactaactactaaatcctatcaacttaaggataaagtaacttatctagaacttttggcaaagtgttactactttggaaatcacccgacagaggcacacgaaacttataaaaaactcatacaaatgtgcccaggcaatgtcagatttgtacttttatactttctaacacatccaaatgttaagatcagggcactctttcacttttcccattgctacactaaacctctcagaggctcaatctatcaagaaaaattattaacagacgcacaaatttttactgagtctgaaaagttaattactgagtctgaaaagttaacagaaggtaaaaagttaactgatgctcaaaagttaacacacggtgaaaatccaatagaaggtaaaaatctgtcagaaagtgaaaaactaaaccctatcagtgatgacacacctgatgagacatgtgtctacatgttgagtgatgagatatttgacttggatggtgagtattcgtcgggtggttggatgttggagagtaagttacatcacagtttcgaccgttacgtacgccgtatgaacatgtgtaacaatgtaacatataggaattctcatacattcccccagtttatgtataaagtagtgaaaaatttggatctgaggtcactgccaacgccggacaagattctctctgtagacgagttaattaaggtaattaactgttatttagatcccacacccttggcgaattgtgttccgtactgtaagtatagaaaatttttaaaacgcgattcgtacccgctggtgtttcagctacggcaactgtcacagtatgaggagttgctactcctggagcaacttgacgccatgaatttgaaggacagatttgtctttgcgatgcttgagtttttgttcagctccgatgagattttccacgccagagctgaaaaatacattaaacagtcgatccgggacggcaaagtcaacatcctcaaatcattcacacacgcactcacctttaaaaaagcgtacatactactctatctcacacacaacttgtgtaaaccagttgacacggtgaatggtgaggaaagaattagtcataattaccagaaagtgctggttaccctattgctagcacaactgtatgactacctaggcgcatactccactgcattacaggttgtaaacgagggttttagaataacaaatacgtcacccgatctactatgtttgaggggtaagattaataggcatttgggagatttgaggagtagttgtgaggactactgtgtggctggtgacttggacaggagtgaccgtcagaccagcgccaagtgtgccaaagcgattctcaggactaacgaattctcattagcgcaaaagaaatggaaatcattcctcaccgaagacgtttgtcacaggaatgacaaggacacaccacccgaaattccctcgttcaaattcctactcctacaagccacactactataccaacttcatcaacattacatattagacacaatttttaagggtaatcataaggattcagatgtacccgttacaccggacaacagaatgacacagtttgacagtgttacagcaggtgacagtgtgacagaaacaccgtgtgacagatggttaaaagaatcgtttggagtgtataagaatgtgttggagaggcatatggagatttatgtgaatcagttggactttcacaattactgtctaaaccgcctgtcgtacagagtttactacaactttctaaaactccgaaaccaacactgcaaccaaggctacttcatcaaagcgctcaaagggctcatcagaacagctctagaactctttcactccactactactactggtgatgatgataataataattgtgtagtgtattgtgtgaataagatgaggatggtgttgtgtcagcgtgtgtttgatgctgggttatatcatttattctatgagttggcggagatgaggggaatgagtgtgttattcaagttacagtgcataatgcggtgttactacagcgcaaggtgtgataaatacaacccccacctcacacagttaatacaccactttctctcacacaacaccaaattcacacactttgaagccaccttagtgaataaaatgctaagaatttgtagtcccaataactttacccgtgcaaatcacactgtagagattactgtagagaatactgtagagtgtagtgtggtggaggactatgtgaataatgtgttggagtatgtgttgagtgagaggtatgagtataagggtgtgatggcgttggtgtttatgggttataactatagggaaaaatcatttttggagttgctttttctcaacgcgaattcgctctacgaggggattaatttcagggacttcctcaaagttaagaaattattatccaaagccatttacacctgcaataacctcaataaccaactcttcctcaaactacaactcgaacaactcatcacactcttcccaaaccaactattgtatccccagagtaatttgtaatcttcttggactaatttgtaatcttgaactaattgtaacattgtattatggtggaaggcggagttgaataattttatataatttgtatgttttaaatatggaattttttttattttaaattttattttttcctcctcagagttttgtttttcttctcagagttttattttccttctcagagttttattttccttctcagaattttattttccttctcagaattttattttttgtcttcaatcatgattatgttaaattgttttttcaagattaatcgcatttcaaatgttaaatttacaaggtaaatgtaataaattgtaaatctcaaatcaacaaataagctcaaaattacccaaatagaggtaaaaaattctccaaatccatctaaatccagccataaattaactaaaattaggtggaaaattgtaaaatatcagtcataaatcgtctaaaataagtaaaatattaagtgaaaaattgtctaaattaactggaaaattatccaaaattgagtcaaaaatcgtctaaattaggtgaaaaactgtctaaatccaaccataaaattgtctaaattaggtgaaaaattttaaaatattaagcctaaattatccaaaatcgagtcaaaagtcatccaaattaagccaaaaataggtgaaaaatctaccataaatcatctaaattaagccaaaaatagtgaaaaatcaaccataaatagtctaaattagctgaaaattcaactgaaaatcgtctaaatcgagtcaaaaatcgtcaaaaattaactcaaaaatcatccaaattaagccaaaaataggtgaaaaatcaaccaaaaatcatccaaattaagcgaaaaatagtccaaattaaccgtaaatcatccaaaattaagccaaaattaatccaaaattaagcgaaattaacctggaaatagtgtaaaatgaagtgtataatagtgtttttggtactgtttgagtgtgctgtggcgcagcctacggcccctgtaaacttagtgttaaacatattaaagcgtaggcctaggggatttaaagtactgaggcagaattactacggcattgacgctttggtttacactgccgatggaattatcgccgaggtcagggactcaaatggtaacatctggcgcagcgacaaatcaattgcatccacgagggtcacaacttttaaaaaagactcgaggctacttcacatacactccgtaaccaccagtgggaagcatctgacgcattatttctacaggtctggccgtgtctggaacgaggttgacagtaagtatttttacgacgaatttgacgttgcgaggttagaatcctcagcggtaggagttcacactttgtatttaaatgacagaaactcacacaggcgtgtgatttggaaccacgcggacacacgttacggcgcctacgcgccagcctccgggatgagattagacaaggtctgtgacgtcaattggggtcacatgtgcgttaaatccgtctggagtaggaggaaaaacgagtatctcctgttttcctcagtgtatcccagggacaaacccacactcgtctacctcgtgctatcagacggctttgaaattactgaacaatattacgaaaaaattggagtcataggccggtggacacaaatcgaacgtgagaaatttgttagtaaagtgtttgatcacgtggatctcacaagtttggacttggacgtcggggtagactttgaaaatgtgaacaaggaaaaagtatacacaagctcatttggcattgaaagaactgtccacattgcgtatccaagacctgggacaacaatttcagccgtcaccgtaggcgagttaatcatctggaaatcaacatcattcgataaatgtgactacgcatgtcttattacagcgccagaagtgcctcttctggcttatttactcctcactgatggtctggataggagaattgaatacttcctaaaccaaaataaactctggattcccatcgaaaaatcaacattctaccaacacctcacacaactcaattgtaacaccaacaactctgttgatgacaatgtgaaccctggggataatgtgaaccctgtgaacaatgatatgcatttggagatgagtagttttaggaataggcgtggtttgttgataagaacgtatcgtagttgtgtgaaagattcgaggggtacaatagtattaacccatgggatagggttgcattttatagaagtggccatgagggcgaatttggactggaattacgccaatttcggcttcataacacatccgttcctcatctgcccagacacttactactacaacttcagacgccacaacggggacagattcagacatattttcgagtataattttgattctcccctgttacccacggggttactgaggaactttgagtattccggcggtctaatgcaattgtttaatcagttgggatacgacgtgtacggcatggatttgcagtctaacggattttccgagagttatgactcgttaaaatcacacgtgtgtgggtccaaagactacctcgacgatatggtccagtttttacacattgtgctggagaataagtttaaagatccagccgagtggacggccaatcccacgttcaacaggggcaaaaaccctgtgatactattcgggttctcatttggcgctaacctgtccatccgcacaatccaagaacttgtcaagagaaatacatctatagataaaactggtggcaatgagagaatgggggacactctgaggatagtggacggcgtggtgtcattgtcgggaatgttgaatatggaatcgcacctgggaacgagattcaaaacgctaatggccacattcatcagaatctgcgccgcactcattcccagaaagattatcaaatttaaaccactcccagtcttcaaccagtcctacccctactccatacttctcaacgtacacaaatattagtcaactaattaacgaattttgactattatttacctatttttactattatttatctatttttaccattatttatctatttttaccgttgtttaagttataatcttaatgtacggtgtaggacgacaaattttacccgcccaggtttagttggaggatggcgttgtatattttattatacgctagacgcgttatcaagaacatgaaattctatcccaaggacctgccaaccctagtcatacacttcaaagatgatcccgcatgctcctttcaagtattcacacaattattatagtattgtatagtatagttagtatagttagtatagttagtatagttagtatagttagtatagttaatatggttaatatatgtaatagtatgttaatgttggtatagggagtgcgagatttgttatcggtgagtggtgggtatgatgtgagatcggtggagataaacgggaacatacatcactcgtacaaacccgaatacatacacatggtctccaaatacttccaagagtggatcaatcatcacttcaacacttaatattctcaacatacactataccatactatacatattatatactatataatatactatatattatatactatactatatatacataatgtatattggtatgtgtatagtagtaggagtataatagggtatattctatagtattactatagtaatgttcaagagattaatcatactatataacacttaataatgattattaacgttgtaacaaggttaaataatgtgcataacatggacatttagatactgtgtcaagacggtgatgtgtcagttataccctaggtaatacactccaatagataattatgttataaacctctatcttaaaggtgttaattacgtataaatcacccctttaaacacttctttaaacagttaaacacatattatctaagtattatctaagtattatctaagtattatctaagtattatttgagtattatttgagttttaagctgtaatttccccggttaaaatgaagtatatacactttatttctactattgaaatattatactaactacatactataaatacaggagtaaagtgtgataaatctgattttgtggaaaattacaaatttgggtaaaaaataaaaatagaattttttcatcaaaaacaatataaattttatgtgaacagtgggaagattggagattcgggtgataattctgttacgagtgccctacacgcacagtgagtgaaagtgcactttaagaaatgagattacaattgtctaaaccggctctaaaccatgtaaaatattctcctctcaactgtctactcagctctcaaatgtgtagccaaattgccagttaattttctcaactttggaataaatttacccaaatttacccaaatttaacgaaatttaacgaaatttaaccaaattaatcttccaaaatttttaaactacaatttttaaacttaactcttacttttctcaatattcctgaaatttcctgaaattttgtgaatattcttggaaatttgtgaatatttgtgagtattattggaaatttgacgaaattatcttatggtaatgtcaactgatttataccgtgggatgggattggagagtctgaaagcgcatgagttgtcgttcctgctgagtggtttgtgtgagatgggaactcgtgtgccacagcttacaaaatctgtaatcgactcttttggcaaagttttagacattttcgacgagaacatacaactcagaattccaccatttgatcccaacactgcttacacagacccgacagacactactgatacacctgtggtatccgagtttcaactacctttcaacgtcgaattcctaggcaaacgcacgcttacacattataacaaatatctgtcccgtaatcccctcaacactgtagacactggggacacagtaacaggggacactgtgggattagacaccagactgtgtacgaattgttacatgtcactgggtacagcttattgttctgagtgttctgattacgtgtgtaacacttgtgctaaacactgtcacggtgaccgggttacccctgtgcctatggagtgtctaactctatcccttacaaccctgcccaaatcacttgtttatgaggattgtactgtccactcgggtgataagcttatgttttcctgtgttaattgtcatttcctacccctgtgtccccggtgtaaagttgaccatgacactgtgcaccgggtcatagtgttggaattagccgtcaccgaggtgaaggaatttatcaacgactgtgtcacttcgttgttggagaggagtaactcaatagcccccgtagtcccagagcttaaccaattgctacacagttccaaaagttttatatcattttgtaacagatcactacggtgcgggttacaaagtgttaacgattctatccacaataagcaatccgcattccacggcgaaatcaacaaccttcaacttctgtcctccaacaatctcaataaactattgaaattaagtaacaagtatgataaatatttattggggaagatggaccagttgagacagttgagtggtataaaggacccggggctgggtcttaatatgttcgtagaactaaaggacacatatgaatcgttactatggcataatgaagatttaccagacctaacacttgagattccacactggcaattgaacacggggaatgtcaataatctactcgcagacaccgaactcaggattaatcatacaatggaactctttctcacactgttccagtatatcaaggaagattccactaggactaaggagtgtattctcaatattgttaaacacaatcccgtaaggggtagtaaggatagggttagtagggatagtagggatagtaagaatagtgttggggatgtgggagatgtgttgagtgatcgtgtgatgggacctgacaccgtaacgcaaatgacaggagtattttggagaaaagactacattcaccgaatcgtatgcaaacgaaccattcaactacacaaccacaaactctacgtcctatcacatcacacactctctactcagtctggtgatattacacacaatactcagtctggtgatattacacacactactgatagtatacacactggtgatgtggaatcggtgatagacttgggatcggtgtgggtgagaggatttgaggatggtgagttgtcggagttttcaaagttggtgcgggttggcgcgccaaacgggttcgagttagtggagcaaaggaggaaccagatgcgcgtctggtcattcaccaacgagtcaagacatttagtcctcctgtggacctcgaaactcaaagttgcctctgccaatgccaggaaattgttgcacaaagttgatctcacgcaactaggactaaacaaggattttgtactcccagtgccgcccaccaagaatattaatagtaatgtagacagtggaaataatagtgtaaaaagtgtaaataatagtgtaaatagtgtaaacagtggtgtaaatagtgtaaaaagtactgtgggaacaatgggaatagttgagagggagtacaattttaaagaagtgtccgaggcgttgaagaagataaagcaagattcaacgttactctacgacaagtgctttcacaccaactcacccaagtcacacaacactgtcaacacggtaaatagtgctgtaaacaacactttaaatagtaataagagtgtaaacagtgtagataatgagaatagtgtagatagtgtgttggtgtgtggcggtcgttataggatcccgagtccgagtagtgtcaagagggagagggcagtgaattttgagtcatttgagtccaaaggggtggaggtgccggaattcgaatttcaaccacaaatcacatcgcccaaatccatacacaagtttttcctatcacatacttaaatttttaatttttttccaatattatttattttattttattatttaattatttttattatttttaaatttttataaatttttataaaattttataaaatttataaattttgtgtaaaaaatgtaaattactgtaaaaatgtgtaaattactgtaaaaaatgtgtaaaaatgtgtaaaaagtgtgtaaattacctttaaaaatgtgtaaattagtgtaaaaagtgtctaaaatgtgtaaataaatgaaaaaagtgtgtaaataagtgtaaaaagtgtgtaaaacggtgttagagaatgttttggagtgttttgaggatgtatagagggaggaataatccgataggtcgtgtgggatttaaaaaggctttgattcgtggcagagcgcagaaatcgcctgagattctattaccgccgtacatctcaatccaggtaactcaactcatcctataatccgtaggagctgagactaatgttgaattctgactacatttcgtgttttcggagcgctaaagtctcaatctcgaaacgtcagtacacctggtcagactcacacggaagaacctttcagacctcgtaatcacaataattacttattaccagataaataacacaatagaaatgtgtagtaacaagaggaacgtgataattccatatgagacatcgagttacttgagtaaaatgatgcgatttaaacccattaaagttgatccggaacctgtgatcccaaaggtatctcacacactaattcacaaatttagagtaaatccgtgggtataccaattattgccgttgtcggacatcataaacatgggaaaaccaccctcatcaataacatcaccggtatccaataactccatactatccccattatttaccattttgcaacctttttactttattttacaattgttaattattttttggtaaataagtggttacagcagcagattattgagttattttcctcggtaaaagctagcccgatcaactttggcatttatttccaaaatcgtgttttttggaattattttttccctaaattgatcaattttctaacattttgtaggcaccaaattccataatacaggggtaacaagtataacaggggtaacggtgtgtgattgtgatggtaggtttacatatttggacactccgggtgatgtgaattttgaggttctgaggggtagggcaattcacgtgtcagacttgtgtgtaattgtaatctcgtcagagggccctgaaaccgtgacccgtgacgtcattttacaagttaacaaattcaacactccagccattttctgcatcaccaagagtgatttacactataacaacgttgatattatcaagtcagaactgtcactgcagctgaacttactactccaggccggactaatccacagaaacttcacacaggaattggataatgctgtgattgtgtcctcttacgataggagtagtattgacacactcaaggaagtaattaagagaaaattacgtgaaataacacccggtcacactgtaattgataaagtaaatagtgtggagaattttgaaaagtatgtgagaagatcgaacagtttggtgggttcgaaggtggtgaagggtgttgggtttatcttggaagttaccaaatcgcagtcccacggcattgtcctaaacgtcattgtcactttcggcaccatcacacacgggaactatttcgtcgccggcacctcatacggcagagtctcctccttactcattaccaacactgttaatagtgtgaatagtgtaaactctggtaacactaatactactgtaaacactgtaaatagtgtaaatagtgtgaatagtgtaaaagtgggaatggtggtgggcgtgacgggattgaggagtttggacggtgtgggagtggacgatgagttgttggtaatgtcgcagcatgacgcgtttaggctaagtcagtacaggaaacaaatccaaacactaaaatcatcacaaatcaaaggtccagaaatcaataccccgtggaacacaaccctacacgtatttactccatagttaattatgctcttaggaatatccaaatgtgtataataatcaactaaatgtaactaatggaactgtggaacagtctgtagatactgttccagtagaccctgtagcccccttagatcgtgtggagacaactgtagcccccgtagagtcgttggagaggtaattttacgtgtgtaactctgttgtagttcgatatacttaaagcccctggaggaggacgaatggaccttaaacgccaaattacataaccaacagttacaccaacgatggcaccacaaatacgccaccaactctcacacaactcactctgttaacacttcagacaaagttgacacaactcacacagttgacacagttgacacttcagacaaagttgacaaagttgacaaagttgacaaagttgggggaatagttgacagagttgggggaatagttgacaaaattgggggagtggtagtgcctgtgatattgagggcaaattacttgggagtgtttgagagtttgttggacgggatagaggagctagagcgtgagttgggagtgaggataccgttggttcacggcgggattgggccggtgatccccagtgacatagtccaggcacaaattggaaacaagttcacattctgccccgtctacagttttcaagtaccaatccacaccgacgcagccaaacacgcaatcatcaacaaagttgtcatcaagtcattcaaccaacacgccgatctactcaacgatatcagacaacgctgcaatcacacactcaaacttcaataatttactacgccactatttactccattatttacccctaattactccattatttacccctaattactccattatttactcagtattttgtatagtatttactcactattttgtatagtatttactcagtattttgtatagtatttactcagtattttgtatagtatttactcagtattttgtatagtatttactcactattctgtatagtatttagtaaagtatttactccattatttactcagtattttgtatagtatttagtatagtatttactaagtatagagttagtgtttactaagtatttagtatagtatttggtaggtgtctgggttttagggtagtccatagggtgtataattactatagtaaagtacgattaagagcgtttaagatgatgtttacggagttttacaacagtttagagtagtatagaggggtttaaagtgtttattaagtagtaaatttagggcttaatattatataatatatactatacattatacatatgtatatatactatagtatactatatatagtatagtaaatatggtatattatggagtattatgttaagagtaaatctcccgcatttccagcattattacactgttaaatcagtattaattcgttaattatcttttttatcaataactttgtagatttgtggacttggtaattctgtcgataatttggtcaaatttccccggggtgaaaaaaattctattaataattattttaaacaatttggtgtaaaaatgttaagtgaatatgtgattaataatatccaatactcccccaaaatcacacactcaaactgtcaaatcaggtactcaatcccattactcacctactcttactctataactaactcactaatatgatcagatgtgtgacattgcctagggagcacccggtgttggtgggtggtttggacggctatggcacgagactactgagcgagtctgaatggcgaaaactcggcattaaaatgtccaaaggctggactcactcaggctactcaccctacgaatcacacattctcatctttcaactgcacacacagtaatacagtagtaaggagtaacacgtaatacagtagtaaggagtaacacgtaacacagtagtaaggagtaagatgtaaaagagtagtaaggagtaagatgtaaaagagtagtaaggagtaagatgtaacacagtagtaaggagtaaagtgagatgagaattgaaagttgttagagaagtttgttgtgtttgtgtttgagaatgtttgataaatttgcttcttcaaaggcttttttctttatactcattaggtattcctcccttttaacactgtccacagctgttaactctttttcgtcagtgttctgtagttgtgatatcttattaagcttatctttaatgtgtaatttaccctcttgaatcattgaatccaattgctcatccactgacacaacgtgttcagttggttcagttaatttgtttagtaattcgatttgcatttttcggttggcagtttcgagaatctcgtctggtggacaaatgtcctcatttactccaaacgcatacttcatcgggtcatatctcctaggacgctcaggtccttttaccctgcgaaccggagatttgtctgatttactatccaatttatcatgtgatatgtctgatctacgtgatttactatccggtttattatgtgatttgtgtgatttacgatgtggtgagttacttctacttctgcgatatctttctctctccctccctctacccctatctttatgtagctccctctcgctatgtttatgtagctccctctcactatccctatgtttatgtagctccctctccctatccctgtacctattagtagctccctctccctccctctctctacccctatgagtatccctctccctccctttatctctatgagtatccctctggctatctccaaatttccgcctaaaatgaatactaaaactaagtaaattactgtttggctttgagattggagtatttgtgtataatttgttgttgttgcgtttcaagtttcttgatgatgaagagcgggtcttctctgaacttgtttaaagtttgttcgtaaactcgggaggagtctgtcaacactgaacccacagacttgtcatccgattctggcctacgtaactcacccctagcacccgggatactctcacccagcaagtaactctcctataaatcatacagttattaagtaaattagttaactcgtgataattgtagataatgagattagttaactggtgatattattggtagttacgaggttattttgttgttgagtgggatcgttgtagagccattcgagcccttcagcctcgattttcgacgaacccgtccatttacccttgtccataaatattcaacttaattatcgggaaaattgtaatatcgtgtaaaatattattattgtgtaaaaatattgtgtaaaatattgtgtaaaaaattgtgtaaaaatagaattaatatttgataaatgaaatttgtaaggtattttattaaaaatttgagagttagttttttttatccaatttttcaaatccccaacgccgtcagcttttgcgattccaactccgtcagcttttgcgattccaacaccgccaagccccgtgattccaagccacaaactcacaaatctcacgttaaccacaatactaataatatttacaatatttatagtgttaataatattaataatatttatagtgtttaatgtatttgtagaatgtttatatgtttggttcggtaaaatcgttgccagagggattaagcaagcatccgctcctacaacgtattttaaacactaattaactgtactaatattctagggttagaatgtaaattagttgattttggcccgaatttcggtgtagcggtggataaaaagtcaaatgtgtatctttggggctctgatactcaaaatggtattctaacacttgtaatcatcattctgtagaatttgttaaaccctttctactctgtacattatccaacatcaaagacctacaagtatttctatagtagttttacacatccccattatttacactttttgcaacctattgatatttattttacaattgttaattattttttggtaaataagtggttactgcagcaattgtggtaattattttcctcggtaaaagctagcccgatcaacttttgcattttatttttttaacccttaaaataataattaaaaattgatttagtgtgcgaataatgagatttacatattattaagcaatggaacgggtaatctctttagtataacaatttgtagtattactaattaaggacgttaatgacattctgaacactccacacgtgaactgtgtgttacaggagataccagagttttctggcggatttttgtataataatccgaagatagtcaggatgagtattgggcagtatcacagcgctttcatatcagacgacggatcgctctgtaacaattattatttattcgttagactgttcaggcaataacgaattcggacaatgcgctcaaaaaccaacacaactacacacagaatccactttcctcgtttacaataataataccaacaccatcgatcagataccacccaccaaagtattttttacctagttttacccttccccacttactattcaaatttgcaacctttttgatatttatttacaatttacaattattttttggtaaatgtgtagttacagcagcagaaatgactgggtaagaaaatttatttctcctaacccgatcaatttttgcactttatttccaaaatccataaatttacaattattttttcataaaattgatctacatagataataatgtgtttaggtaaggtttagggagaacgtgaggataaaggacgtggtgtgtggtcaaacccatactctctgcattgataccaataataatatctactcgtatcttctttacctattattttactcaatataatattgtaatgtgtaaatatagatttggggatgatagtgagattgaattattttttggtgacagcaggggtaagtcaatcttcgaacaccgacactacaagccctacctcaaacgcatatacaacttctctcccatcaacacctccccaatcatctacaatcaaaccgaaaagtatctctaacttctttactcatatacaattgttacacagttaacacatacgtagttaagtagtaaacagtgtaaatattgtagacacttgcaatatgtgccggtgcggataaatgagatgtcacttctgaagaggtatggagagctgataaggaaatcagacattaaactacaagccggaaatcacttcaccatcatcgccatcaccccgacacactctctccacactgtcaacaatgtcaacactaacaatagtgtcaataatgttaacaatgtgaacattgtcaacagagtgaatggtgtgaacaattcgataatattgtcgagtggcttgaatgtgtctggtcagtgtggaagtttggaccctgtgtcaacagcggctaagagggtaagaataagtaagcctgttagggatttgacatgcggtaccgcacactgctttctactcaccaataactccatttacctctggggagataataaacagaaacaacttagtttaggtgcgttacggggcttgctaccgctcacacagttatgtagccacagagatagccaccccaatgggactctttttacccttagcactttgttaattagctctccttaggtagttaagtagctctctatccctatcccctaagtagctccctctaggggtattagttaagtagccccctctcccttatgtagttaattagctccctctcggggtatagttatgtatagttaagtagctccctctaggggtattagttaagtagctccctctaggggtacagttatgtatacttaattagctccctctaggggtactatttgcaatatttaagtagctccctctaggggtatagttaattagctctccttaggggtacatagtactaagtatatagtaagatagctccctctaggggtactagttaattagctctccttaggacttaattagctctccttaggtagttaagtagctatctatcccttatgtagttaattagctccctctaggggtactatttgcagtagttaagtagctccctctaggggtactagttaatcagctctccttagggtatagtaagatagctccctctaggggtatatagttaattagctccctctaggggtatagttaattagctctccttaggggtacatagtactaagtatatagtaagatagctccctctaggggtattagttatatactagactactatagttacatactatagaagtactatatagatagttgtaagctctcccttatgtagttatttctccttaggggtattagttaaatagatgtaaatatgcaagcaccgtaacggaatattagataaaaaaactgtttggactcccgaaagactaaaattaaaccccgaagaagagataaaatacatcaaatgctcatacaacaactcagccatcatcacacaacacaatcaataatcacacaacacaatcaataatttaatcccaccaattattttattaaattaaattaaatattaataaattaaatattaatattaaaataaaataattaatggtaaataagaagaagcctcctagggggctcgaacccctgaccaccagattaaaagtctggcgctctaccgactgagctaaagaggcctcaatccaatcccatatcactctttcacctatccactcaatcctacacattcttacactattatataatttattccatatcttccagattccactacaatagtgtaaactgtaccatattttaatattgtaccatattataatactgtacgatagtgtaaatagtgagaacaattgtgagatgttaagaatgtatgaaagattattggtggtattgtctagggagcggaatatatattttaatttatcgttggagaattatttattgagtactttttccactggaaggctgtggaataatgttagtaattcggcgtactcgagggttttgtacttttggagaaactcacccgccgtcatcattggaaggaaccaaaacctctactcagaatgtaatttaaacaatattacacaagatgtcaacatcgtcagaagattcacaggcggtggcgctgtctaccaggtttcttcaccagtctactcttttccacacttttctacacattattagtagtgttatattgataaattattgaaaaattgtaaaatttggcaaagtgtcaaaaagtgtaaactcgtgacaacaaataattttactaaatccacaattatacagataaaatatatacaaaataagtattaaaatgatgtaacaattaattaatataatttatatattatatatatattatattatatattgtgtatattacacattgtatatacaacgtagtataatacacgtagtacagtaagttgtatagtattgtaggacttggggaacttgtgttttacgatcatttcagactccaagacccacgacttcaacacgaactctcaactcatctgctcagctctaaccaaactcattggtaattcctacactattaatcttattcactgtgttattcttatttacactattaatattatttactgtgttaatattatttactgtgttaatatttgtcaggagtccgatgtgatcctacgggtagaaatgacatgtgtgtaaatggtcttaaggtgtggtgatattagatttacttgttttatagttttccggatccgcattcaaagtgttacctaacgctgctttacatcatggtgcgttacggtgcttgcatccaatcacagggtttagtcataccctggggactatttccacagttattcccttctagacagttaaataagattatgcattaggaacgttgttgataaacataaataaaggttccttggagaagtacttaacacccgaaaagtccaaactcgccgtaatcccacaattatacaattatttcgttaactatacaattatttcgttaactatacaattatttcgttaactgtgcaatttgataaatgtgtgtagaagcacaatgtgaagagtgtggagtcaagagtaactaacttggctcagttcaaacctgacatcacacaccaagaagtacttttaactctgttataattcattaggtctgtgactccatcatcagtgagaccgtcacacactttcaatacacacacagcgaagtaactacatagctaattttaccatgtaatgtgtagttgtgggaagtggatcagactagcgaagtgtgcaacgaacaggagttcaaggaatgttacaacaaacttaccgtaacacacaatataacatgtgatttcaggatagagactggatttatgggacgaatttgaggaatgagatgaatgggatgaatgggatgaatgggatgaatgtgaggagtttgaggaacaggtttgagtttgggagtgtcgagttctgtctggacataagagacaaccaagtagaaaatgtcttcatctattccgacatgctaaacgccgatttcatccaacacttgatcaagaaattcaataaatccccattcccaaacacttttcaggcgtttgaagagattctcaattccgtgggtaatctggaaactgtgtcaatattggtgtagaatatccaaactgtgaggaatatgtaagacaaatcaaggcgtggctacgagaatctttatgattaatattatacatgtgtaatacttagtagattgagtttatgaggtcaactgatcccttggttggggatatttatgtgtagtttccagactaatgtcatatctaggctcagtagaatgtcattagatttagttatttgggtacattacaggtagttaattacattacccacccatagtcaacttactctcaacagtgtttgaaggagctaattacctaatttaaggcataattaatgtataattaaggtgtaattaaggtttaattatgttttattatgctttattctgtgttaatttggtgttatataactatactatagtactataaatatactcccactactatacacatatacatatacacatagtatattatatatagtatagtatatatggtatagtatagttagtgggtgtctgggtttatgtatatagttaaggtattgctattctatgttctatatatactattataccctcagtaacatactatagtactatagtattcttaggtatatatttaattagctccctctaggggtattagtttattggctccctctaggggtatatatttaagatagctccctctaggggtatatagttaatagtatataatagtatagtgttgagagtatattaggtatgaagttggagtattattcgtagtaattggtgttttgtatgagttcgattttcttgtcgatgaagttcctggtggtgtctctgagtgtgttgaggtgatgattaaacttgaaaggtgcccagaatatcgtcggctgcgtactcgtcgctataaagttacccatactctcataatgctcacacagtctcattctctacaatatttatactattagtagtggataccatcaactgggtctgctttttgtttaattccgttgttatctcctctaatcgcttcttattcacgtcatactcatcctacaacattatgccgtactaagtaaaacgttgtgttaattcagttgagttaattcagttgagttaataagttgtgtagaatggtacttgaatatctttttgaagtagtgttgactgttccttttgtttttcctcaagttttgtgtctatcaacttctccttctcaatgtgcttcaatatctacaccaatttacacagtaacagtagtaacttagtagtaataacttagtagtaataacttagtagtaataacttagtagtaataacttaaagtaataactgagtagtaatatatgtgattgcgactttttgatcatctttttctttgacgagagcgtctttggctttgagtaagtaaccaaagaggccaactttcattaaacgcttgtgcctgtgaactgtctccgaatcatcctctaccctaggccgcttctcaggctcataatccataaacccatcgtcctaacacataacattattactattatatagtaaagtagctccctctaggggtattagttaagtagctccctctaggggtattagttaattagctccctctaggggtactagttaatcagctctccttagggtatagtaagatagctccctctaggggtatataaagtagctctccttaggggtatataaagtagctctccttaggggtatataattaattagctccctctaggggtatagttaagtatagttgagtaagtgtggaatactttggatttgcgtttggaatcgaatgaattggtatttaaaactttatttgacaataatacattagaatctccatctaacaaattattacaacctcatctcaaaaaaataaaattatgaaaataatggagtaaaaattactgttgaagttggtgagttggtttgatagctttttgagggccaaatttacggcttttctctcctggattaatacacgaatctcatcctccagtcgcacttccatccataacacctcttaacacttcttaacaataataacacaacttaacacaggaatataataaatataatgaataaaataatgtgatgaaattattgtaattgattgattaggtggtttagatcttgttgattgatggtataaatgttgggttcaggttgtataacgggaatggatatttctggtaattttggcaggatagtaaagtttggcgatttagtctggtgatgccacgtgaaatctttaatcaagtgtttattatccgggaattctaaccccagccccgacaactacacattggttacaactatatttatacctccaagtggtttacataccactcatacaccacactattatccacaaatactatacccgcacttctatcacattattattacatagtagtgaataataataataggtatagtttagttaactcgtgtgaacactaaaggactaggaacagtctagagtaacttgggagtagtatagttgtacagtagtcctgtagcaatgtgttccagtacggggtctcgaacccacgacttctaggtaccgtagatagtactaacacactcggctattagggatataactagagtataaattgtataataatgagataccgttcgatgatgggcggagtgattgtgttgatgtgtagtttggtgttgtgtgagtttgagactcgcaactgtcttgacgttgctattatcacactgtcccgcacaccactaatcatcaccgatccactcaccactccaacactaaacatcactatttactatactaatactaatactatttactatactaatactatttactatactaatactatttactatagtaatactatttactatactaatactatttactatactaatactatttactatactaatactatttactatactaatactatttactatactaatactatttactatactaatactatttactatactaatactatttactatactaatactatgtaaatgagtaaataagtatgtgcaagcaccgtaacggaaataccacaaaatagagttaaaagaattgtagatgaagcaagaatctgaagcattcaatagaaatatcctacaccggtcctgtaataatattaacaccataaatagtacaatgttctccaagcttattgatcccagcctctcatcctcaaccctcaatattctacgcaatcatactaaattatggataattgagtagattatgactaatttgagtatagtaatgtgaagaatttgcggagaaaaaagagcagcaagaaaaaaaatttcgctctcggaccagtctactccattgactggtcctcgagctccctctcccactccttatagtataatacagtagtatgtaagtatttattacgtctgattcttgatgttctttattatataattctccccaaacttcttctcctccacactgtccacagtttcttccacatcctccacagtattattcacagtatcttccacaatagtattgacagtatcctctacagtattagtaatattagaagtgttagagaatgagttatgtgatttaaaggcgaatttagcgtgtggtttgctctgtttaatcttcaaattcaatatactcaacacaccattcaacttctaatacaacattattaactatagtaactttagtatataagtatagtaactatagtactaagtataaaagtatagtaactatagaactaagtataaaagtgtaagactgagttagttacggagtagagagcgggattgggtttgtttgggagtgcttggttaattaattctttcattatattttgtgtttttattactaatttctccatctccgatgggagctccacctccatcgcaatcttccataaagattccacttcatattccacctcatactccacatcatattccactccttccattcacattattcacagtgtttatactatttacactgtaaacattagtaacaaagttggcagagtgaatagtgagaatgtgggagaagtataagattgataaccctataattaaaaataatttagtgtatatattggaacaatgtgttccggggctaaaaatataaggataaaattttggtttattttattactgatcgctggggaatttgttcgttgtattaacatcactttggctcccaaggaattacgctgcttcacttcctacgcttccaaaggagataagatcatcgggtaccaattaccactctgttatattggaaatattattatttattagattatttggttatttggtaaatttggtgttttaggtctgttggtgtggtaccggcggattcgatggctgaggtgaatttatacaaagttgagagtaacttaatacataaccaaagggataatcctataccatcgctcgatttctcaaatcttaattttaacgtatttccgttacggagcttgatactactcagttactcagttatttacccaacaattttaacattttgcaaccttttgatatttatttattttttacaattattttttggtaaatatgttgttactgcagcaaaaatgactgggtgagaaaatttaaattcgtaacccgatcaacttttgtattttatttttttttacttaaattttagtaaatttacaggtgttggagaatagtttttattcgttgtgtgtgacgaatcatcattcggactatgtgacgtttgtgatatcatttagagttgaaaccatttccaataaaggaatgtcctcactttcaaccgttgaagacctcaaaggcgttatcacctacgcagaacgacttctcacttccgtatacaacctaccccattatttactaatttgcaacctatttactttattttactttttacaattatttttcactaaataagtggttactgcagcaatttggtagatattttcctccccaatagttataccatagtcataccatagttatacagttaatactacggagatatgtgtgaacagactagggagataatggagcgtatggaggcgtatagtacgcgtgagtatttgttgtcgaagataataaataagatgaactcgcgtattattacttggtcaattgttcaaatgatcgtcgttatcgggctctgctgctatcaaatctaccacatctcctccttcttcgaagttaaatctttcgtataatatactcacattttacacacattttacagttattcttttagcagcaaataagagaggaaaatttatttatcgcaacccgatcaacttttgcatttattttttttctcacaattttcacaattttcaaacaaatttgataaaaaaaataataataaaataataaattaataaaaatgtgtaaaataaagttagaaaattagaaatcttcgtcgaatttgatttcggtggtgtgttcggttttttgttttttgattacttgtctgatgttaagatcgaccgtgggatgatttagccactccacgtcaaagtctgaactgtacaacgttctatacccacacaccatcaacacattattacccacccactccatgtaaccccggagaacatctgttaacactgttaattattcttaaccacttaactacttaactaattaactattaaactattgtagaaaactgtgtaaataatactttgtgtaatggccatgagagagagtggtagaaatttgttggcgaaatcgtattccaattttagcgcttctttaattagttgtacgacgtccgattcgagcattttatgttgcagtagtgtgaatgtgcagtgtgcaaatctggtgtggatatgcctgtccttactcacagcatccaacgccaaagtaaacgtaggcaataacttctccttcaccaagtagtcacggagaatattaaatgtggccgtgaacaataacttagatataacaacgagtaacacacgtttaaagaaacatttgttcttctcacactcgttatagagccacgttatcttatcctgtccctacaaccatcattagaattgttatagttaaatgagttgtaatagtcgagtgagtagtattgatcccgggtgaacaccaaagtcaagcgacaattggcccggatagtagtgaggcgggggactgccaaggggagctaagtaactatattactatactacagtttactacaatattaatactatagtaagtcaatatagtggagtggaaccaccatatctagggtgaacaccaaagtcaagcgggaattggcccggatagtagtgaggcgggggactgccaaggggagctagttatatataattaactgattaataagatacaattgtgttatcaagtggttgattgagaagttggaacatggtaccgatggtttcggtgtggatattttcatcagtgagttgaaatccgtaaaacgccctggcctctgctatttgtacctcactcagtaactccaacgtcatatccactggacgacatacccacttgttatcactacacattttttattccataattaagtaaactatcataactactatatttggggagtcaccctatttttaggtgtataattaagtaaattatgataactactaatttcggggagtctgggtaaaattaagtagaatgtgataactactaattccggggagtcggggtaaaatatgttaataagtaattaagtatataactatagaagtagtgtattacagattgatatgaaaggataagaggtggaaaagagagttgaaaaggggttttggtaatttgaagagtgagttgagatcatcagaaaatataaaatcctcagcagcccagaaattattctccacctccttatacattatctatacaacattaccttatactattataatggtattaaggtgtgtaacttaggagtaaaatgtgtaaagatacccagaaagtgtcatgctcaataggaaacataacctaaaaaatatcaataataatttaaaataattaataataatttaataataagtaaaaaataaataaaaatgtgttgtacccatcggttatgattttctttgagtaaaatttcgtcattttgtacttcctcaatggaagcacagggtaaatacttatacaccatcgttccactcattttcactcagtaataattaacaaatattaactgtttataaggggtaaaagggggaaacgttgtttatcaccataattgttaagtaacgtaaaaaattgttaaatactgtaaaaaattgttaaactaatattttttttgtattattttatttttgtagtttatttttaattttcctgtaaaatattctcaatgtgctgaaatctttttatttcacttttatatacaaattggcattcagtaaattaattctatacacattaattactatataaaatgagaataacaaatttgctcattctgccgcttacggcgttaatctccctaacgggaacaacagcgttgacagacgttgaactgagtgaacgaataattgactcgtttaagttaatgtataagcagataagttacgcgtcgtattatatgaagcgtaggattgataagttgggatttgagcgtcctgcgttaaactcctacgtcaaggccatgacaagtgatacggaaaaagtactatgtgaacttggattcatagtggaaaaggagttaccactccgtacttcttctcttgacattactcacggctattcctttgcacatgatccagcacatttccagcaatatcccacggtggaatcgaagatcagatcgggagtggaactgatgttacattcgttctcattttggaagttgcactttaatcacttgattgggtttttaagtcttggtaccagcaggccaaagaacgacaacgtgttcaagttagtctaccacgactttgtcatgatcttcttcccaatcaccagactcatttaccaacactacaacgtcaagtttaaaagtgtgaagcccgaggaaatatattccaagggattgtatgtgaatgctattaaactgttcagcggtacggataattacgaaggattcaacgatgaaagcttgttgatacagctgatcaagagaacttactggagtgacgcagacctcatcaatcgcatgttcaaagatatcaagtcacaagttaaaacattaccaaactatgtacagtcactctttaacatctttcaaatttaccaatccaatctcaacaaagtttaatttcatacatttgctcattgtaaaaatgtgtaaaatagttaaattagtgtgtaaaaatgtgtaaaatagttaaattagtgtgtaagaatgtgtaaaaatgtgtaaaaatgtgtaagaatgtgtaaaaatgtgtaagaatgtgtaagaatgtgtaagaatgtgtaaaaatgtgtaagaatgtgtaagaatgtgtaagaatgtgtaagaatgtgtaaaaatgtgtaaaaatgtgtaaaaatgtgtaaaaatgtgtaaaaatgtgtaaaaatgtgtagaagggggtaaaaaatgtgtaaaaggggtaaaaaatgtgtaaaaggggtaaaaaaaaattttcctgaatctttgtgaaattagtttaaaaaaataaaaaacaactaattaaaatgattaaaatgaaatttaagcgaaatttagtgaaaaaacgacaattttaattttgatgtggtgtcaaatttttttattttatacattaattcattattttattcatcaaactaatattacaaaattgtatattaaattgcattaattgtataaattgcattaattgtattaaattgtataataaaattgtataaattgtatgaaaaatgaaaattgtattaattgtgttgttgttgcgtttggttgaatcgtatttgggtacggacaaggaggagttattgcgtcctgtgagtatttttacgccgagtgcgaggttggattccgagttatccctgatgagtcgtgcgttatttgacgatttgcatcgctattcagcccaaaatccctcagaccaactcattaggatagaattcttcttcacacatcgctacgccgtgagattggaatctttacttaattccatcaaattattaatagactcggtgggtggtacggagttagcgaaaaaattggaaaaaccgatcgaacttcactatgacaagttactggagagtatttacgacactttaaaattaattcaagactcaatgttacacattttagaccagtatgaagacccgaactatgaagtaaaacccagaaaacacaacaccttcaccacatacaactcaatgtacaaatctttcgacaccgtcaacaggctaataaagataataaaactagaattgacccagtctagacacacggatgcggaaaaaataatctatacactgaggaataaattggagttactggccctaagtgtgaggattgggtttttggaaagtgtgtataatttaggctacgtaaagggcttaaaaatgagctttatacagactggcatctactacctaatcacgtacgagtatggaatttcacacgaaattgccaaaactgagttggtagagcagatggactacttcgaaagttacatgagtaactatacaaactcctgggaaaagctgtttaactttgttctgtttcatatcaaggaacatgaactcgtactcgacacctctgaaacgctacacaaagatctaacactcatgctcaatgatttaaacgaattactatcgtcactcaccaaataactcttttacccgatttattaattcggattttcacgattttgtaaataattgccaaagttgatcgggctacgatttaccgaggaaaatatctatcaatattgctgcagtaactactcatttaccaaaaaataattgtaaataataaaataaagtaaagaggttgcaaaatgttaaaattgttgggtaactaacatgtaccctgagtatatgtgtaaaataacatacttgaaaatgaagtttaaacacgctaaaaacgctagtaatataatgtcacactcattgcttacttgatttacactagataacgttaatataccgtagatatgatgtataggttgacatgtgtaacagggtacgctgaggtgttacgggtaaaattaaaattacccaaaataatcacaaataattgataaaatgataaattaatttattaataatttattaataatttattaataatttattaatgggatgggatcggggattgtgtgaaaagttcggagatgcgttgggagtacaatatagtgtagtgattgtgcatataaaatgatataagaatgcactgtgggattttttacactttcacaacattcgcaagatcctttccatccacgccaatatcgtcagattattatccttttattattctcacgccattaaattttttattttgtaccataaatttcttttattttatcttgtaccataaattttccaatatctcgtaacgttttccaatatcttgtaacgttttacaacactgtgtaatattttgtaacattttccaacattgtgtaacattttgtaagattgtgtaaatttttgtaagattgtgtaagaattgttggatgtgtcggaatgaattctccgttgataagggaggatactttatctgtaatgagttataatgtgcagtgtatcccttggtacttagcgcccggttataacatcggaattagggcccggatcttacccaaatacctcgtagaactcgtcaggaaatacgccgtcgacgtcttaatcctacaggaatgcttcgatagaaatgtcttcaacactttcaaacttgctctacaaactctcctacccttctccaccgatctcatcggtaaattactctattctagcactaataatgttaatatttaatgttaatagttaatgttaatagttaatgttaatagtaatgttaggtgttaattagggtattataggtactcagttacccatccccattatttcataatttgcaacctttttggtatttatttacaatttacaattgttttttggtaaataagtggttgaagcagcagattattgagttattttcctcgataattcgtaacccgatcaactttggcatttatttccaaaatcgcgttttttgcaattatttttcgccaaatttgaccaaatttattcatacaattatatacttaactgacatacttaacctattgtttgtaggactgaagaatgactgggacagtactgtggacaattcgaatcgttggttaatattgacaaacggtggcgtgtgtataatgtctcgttatccgatcctggagcgtcatcagttgatcttcaaaaactgtcgtaacacatgttctctagcgtctaaaggcgcttgtgttgctgtgattagcaaggctggcaaacgtgtcaacgttgtgggcacacacttacaagcgtacgacgggcctgccaaaaccgtacgccaaaaacagtacaaggaaattattcactggcttgaacttctcagccggtcggaacatggagtttcagatgacgacccgttcatcctggctggtgatttgaacacttgctgcttaactgacacgcccgaattcaaggcaatgttatcgcccagggagaagaacttcatcaaattctctcacacactcggggataaagatcccacctactgctcaatcaccaatgattactgcaaaatgtgtacgttacggtgcttgcatccctcaaacaatttatctatttactctatcaacttatttatcatttatttaccccctgaactctattcagttgtttactctcttaactttattcatttgtttactgtgtagttatgatttacaggagtttatttaccctccctaaacacttaaaaatacaattaatatgtgattaggtaatgtggattcgatatcgagtgtgtttgattatatattggctggccctggtgtgcgtgtggtacatccgcaaactgtggttagagataagctccacgcgccaattagagttcgcaagtattatctacactgtatcgggacctgcaccatggaaacttataacccctcagatcactatcccgtctactccattctcgcattctaatatcatccctttctatactttagtatattatccatagtatttagtatttagtatttagtatagtatatggtatggtatggtagtggtaggtgtctgggtttatggctagtaaattagttgtaaaatactatagtacagtacaattaagagggattaagatggtgtttacggcggtttacaagagtatagagtggtttttaggggtttaaagtgatttattaaggtgttaatttagtactgtatttatatgctactatacatatacagtatattatacatagtatataatatatagtatagtaatagtatagtaatagtatagtaatagtatagtatattttgaggtgtattagttaagagtatatagtattatagtcatatagtatagatattctagtaatacacgtgcagtagtacagtatattacagtagttaggagtcttaggtataggtattaattgtctgggttttgttatcataggtatactatagtactatagtattaggcactaagtatcccaagtatatagtataagtaaatagtattataggtatataatatatagttaataggtattaggtataataggagtatagttaagagtagttagacaatacagtactctaaatagttaaggtattagaatatagtattatctgtcagggtttaagtgtatagtatagtatacagtattcttaggtattctaaaactataggatattcttaggtatatagttaaatacttaatttagctccctctaggggtatataattatggatatatagttaagtagctccctctcggggtatactaagatagctccctctaggggtatataattatggatatatagttaagtagctccctctcggggtatactaagatagctccctctaggggtatataattatggatatatagttaagtagctccctctcggggtatactaagatagctccctctcggggtataatagttaatttagctccctctaggggtatatatctaattagctccctctaggggtataatagttaggtatagtattaagatattaaatataatgattatgttaaatgttattgagattagcgagtgctagattaacgttgagttgtatggtatcatgtgggaagttccggagcggtaacgtctctcccaactcgttcatctgatcccaacggtccttgttatcagtcacatgactcaaacacacactcaacactctgttctcatcactctccatacactctgtaacttcagtttccttatccacagtactccctacaatattatcacactgttacacattatcacactattataatattacacactattaactatgtgaatatgtgagtaaatggttgggaacttgtgttatgttgtggaatgttggcaatttcggtgtagagtgggatgacgaagatggcgaggaacccgctttgtgctttgggtaggtggttgtgtttattgggatcgcagagtggtgtgattgggagtccaaggctaagttcctctaacccttgcgtgtagaactcctggaccagacgctgtgaccactccaaggttaaacgccactccatacaagaactgccaatgtcagacgcctttattaacatcttacaaatcgtgtcaatctcaccctcaaccgaaaactccctagaagctcttctcaccctacaacatattcacacagttttattatttaattaataaatttgtcgattttggaaataaatgccaaagttgatcgggctacgaattggagaggaaaatagttgtagttattgctgcagtaactacttaattagtaaaaaacaattgtaaattgtaaataaatatcaaaaaggttgcaaattgagaaataatggggataggtaaataagtaactagtatagatatgagttagtagtagccaaagggacaaaaagagtcctattggggtggctaactctgtagctacataactggtgccgttggacctgacaccgtaacgtacctaaactgtgtgattgtttgaaagtgatcttctaaatcggtggaaagtatcaattgtatgatttttctcctgacgattttcatttcttctttatcgagaaatgagaacaagttactttgtctgagaacgttgaaggtgaggcagcagtggaagttctctaggacacttttatcattgaataaatgtgccagctggtgtcccgagttaataaaaaacgcatttgtgagtccaggatgcccaatgtcatgacaaagccctgagattatcaaaattgtccggtcaatcacagaaagtctggagtaaacgttggtaaagttactcaggcacaggagcttctgacatacaaaaacgccgtgcatttggttatggtatgagacgttattataacatttctcgaccaacccgaggaaactgtaaattacatccgtgggaatgttgaagtgggtttgaaattctgatagtaacacacagcctattgagatgaatcccgtgggattctggcggaaatagtccaaaatgctaaagttccaatcattcaacagctggtccaaggtgattaacggggcatcagaacttactcctgacacaccagacaagggaatactaacatatttatactccctatccacaccatccactacacagtaccattattacttaacttaccataaatagtgtgtaaaataggtaatttagtgtgtaaaatactattagtgtgtaagtgtgtaaatgtgtgtaggaatgtgtaaaaaagacacgttagtgtcgaaataagacacggtagtgtgtaacagtaactaagtgtgtaaaatactattagtgtgtaaaaatgtgtaagtgtataagaatgtgtaaaatacataactgaatgtgtaaatgtgtaaatgagtgggtacaattggaatgattgatgggagtaaaataagaagtgtatagagagttgagtagttcggatccggttcccatttcttcaaagactttattatatttaatgttgaagaggttggactttgtcagttgtgtgattgagttttccagcgtaacaagtgtctggttaaagtaactgcacgtctccggcatgttattcccaatcatgttatggattattttaatcagttttttggatattgttaggttacggaggatcagttccacaggcgcagagtcgggcggagtgacaacctggtgactgtgtttaacagagtgttgtattttctctattttaatggaagtaattatccaattgtagaaggaaatacggagctgtatctccgtagaaaaaccgccaaaatataacaacaccaatatcaacacataaaatactatacgaaacaatctaaacacaccagtacagagttttatcaacaaatttttatataataatatttgagataaataattctaattaggagtaaatagttgtaataattgctgcggtagtagtaatacgggtaagtgaaagagatgtgagtattgtaagagtttgtgatggtgttgacggagtaaaagatgataaattgtatatggatccataaagtcctggaggttctaaacatattactaaggttggaaactccgttacggagtaaggtccacatatagccaaataaccacataaccaagtttataactatgtgaatatgtaaatagtgtgtaaatatgtaaatagggtaaatagtgtgtaagtgtgtaaaagtgtgtaaatagtgaggaaatgtgtaagtgtgtaaatagtgaggaaatgtgtgagtgttagcaagcaccgtaacggagaaacctaatgggtaagaaagcgtcaagagtaataattggtagaatgcagtagacgaagaaaacagttttaaaagactctgtggagacaattaactgggaaactgaactcttgaaatattttacacggcacaaatacgataccacaaaataccaacaaccccaaatcaaacttatctacaacatattcacacagtttaattatttaattagaaatttggggattttggaaataaatgctaaagttgatcgggctaggatttactgaggaaaataattctaatttttgctgcttcaataacacatttaccaaatttaattagtaaaaaataaataaatatcaaagaggttgcaaaaagtgtaaataatggggtagtgtaactaggagtgattggttacgagaactaaggagtaatagagagaggtttcggcgaattgatgaaatttgtaatgaagtgaactgatgggaatgaaaataagcaaaagcgtcaaacacatcaacacatgaaataacacaccaatcaaaccatcactcctcatcaaacctacaaacaattattatttgtcaaatttatcgaaaaataattgtgaaaaatgggtaaaaaaaataaaatgcaaaagttgatcgggttacgagaaataaattttttcacccagtcattattgctgctgtaaccactcatttaccaaaaaataatagcaaaaataaaataaatatcaaaacggttgcaaattagtaaataatggggatgtgtaaataggtatctagtatagatatgagtaactacacaagtaggcggtagcaagcaccgtaacggaaacctatattaccgaatgagatagagttaattggccagaaaaagagcgtaatgacaagattcagaagggagataaaaattaaccgtccgagaatccagtgattaatattgagagcgtaaagttcttccaagtactgatgattaaattttagcgggaatttcttcataaagccaaagccctcgatgtttcccaacgagttacgctccacatatcccaaacgcttacagtcgccatgcacatctatcactcattccaataattacactatctactcctaacaatgcgtaactgcgtaattattatttaattagaaattttgggtaaaaaaaataaaatgccaaagttgatcgggttacgattggagaggaaaataactcaataatatgctgctgtaactacttatttacgaaatttaattagtaaaaagtaaaataaatataaataggttgcaaaagagtatagaatggggtaatgaaaaactttgattgagtttgagggattcgaggatatcgtcggtgagcgtctgctgcttagaattgtcattgaacagttcaggacccttgaaattgtagccgtaaatattcaaatacgtaggacgaatcgttaaactcaatacctccaactcattctcactcttctcctcaatatttccacctatttccacattaccattaacattactactgttattagtgttaacactgtcaacagtgttattagagttattagagttaatgttggagagattgggggatgagttgatggaagggatgtgtatgatagagactgtcattttgtaaattaaataaaataatccgattccataatattttacaaaataataaaattattataaagtaatgaaaataaaaatattaatgaaattataaaataaaattggtaaaaaaaatattctgtttggaatgtgtaaaaagtgttataatatataaatttatacgcatagttggataaaataatgacattatttactatataaaaatcaaaaaataatgttttttcaacaatataattattataaaggtaatatttacggattccagggaaaatatcaattttcgaaaaattaaaaattatccaaaaaacaattaaataattaaaccaataatctaataataatctaataataatctaataataattaaataataatctaataataatctaataataattaaataataatttaaaaattatctaaattctataagatctgtgaattactggacaccgatctaaagtaagtggaaaaagggatatgaacaaataaaatcccgtgtgatataaaactatgagataaaattgtgagtgtgtgagattgaggtgattggttgaggaaactgagttagagttagtgacctgacaaaggatggggtggcgtagagtataaatagattctcataatatatgaagtgttgtaatggaatagatgagtttggtagctaagagaattgatatatcttgtgtttgtaaactcggagattcaggcccctagccccaactctaatctaatatatattcatacatacgcccttccatatctatccgaatacacatttattattccacaatgctctaattataactctccatacctctctactcaataactatcccccaaattccctgattctctatcgaattttgttatctattgaatttttttcgttaaattaggaaatatttttgtgttatgtattgaattttttttgttaaattaggaaatatttttgtgttaaattaggaaatattttgtattttgtgttattatctcatgtgttaaatattacactttacggcagttcactgctcattcaattcattaatttttatcaaatttacaacaatttatcgaatttttacaagaaattatcgaatttttacaacaatttatcgaatttttcgtcggaatttatcaaaattttacaacaaattgacaaattttacatcggaatttatggaattaaatggcggaatcgacagtaaacgctaaattattcgtcggctccataccctcaaacacctccgaagtttgttcccaactcatctaattacttagttattcacattaattattcatttatttactcaattaattaattaattagttaattaatgatttgtttactcgtaatagtgtgaatgtgtaggaggagttgaaggaggagttatcgaagtatggtcaattggtatctttattttatatgccggatcagatgaagcagaacaacggctgggcttttgtcactttcgaaagtaatcaatccgcctccaacgccatcgatgctctcaacgggaaaatcatttttcaagtacgttacggggcttgctcccaactatttagttatgtagtttccacagacagccaccccaatgggactctttagccccgaaggggctttagtgattaactctatttaccttatccccattattttacaatttgcaacctttttggtattttatttttattttacaattaaaatttggtaaatgtgtagttactgcagcagaaattgatttacggagaaattttatttctcctaacccgatcaacttttgcattttatttttttttaccccaattttacaataattttctaattaaataattaaatgataatttcagggtacaacggttggattggaggttgtgtatgcttcacagcgtagtatggttgaaaatcagccttcggtcccagcagttcctgcgagttcagttttgtggcagcaatttaccacagctgaaggtgtgccttactattacaatgtgagaactggtcaaactcagtgggagaaaccggcagagttaatggccccggcgcgtacagtggctggtggttcctcatttggccctccaggtgctaacttatttgtattccacgtgccggcaaattggaacgatttggacttggtagagcactttaaacactttgggaatgtgattagtgcccgggtccaacgtgactctgctggcaggaaccgggggttcgggtttatctcctacgataatccccagagtgccgtggtcgccatcaagaacatgaacggcttcagcgttggcgggaaatacctcaaagtacaactaaaaaagggagaagaacactacatgcaaatggaacccatacactacccacagtactccacacaactaaccaaccccaataacacactcactcccaaatatcaaatgcactataatccctactaacttcttatctcattgagcttatcgtattatagtattgagtttatctcattgagcttatcgtattatagtattgagtttatcgtattgagtgtgtggtgggtatattagagattagtgtgagaatgtgggaaaatgtacaatagtaaattgtaatctcttacaatcttttatatatattatgtattgttagtatttaggaatagttatataaagtgtgtaaggtatagtacggtggattagttggcactgtaaactcccgggtataccagtactacatactataataatatgtatatacatgagtatattatgcctaagacctataacagatacctgaattatatacccctagagggagctactttactatataagggagagggagagggagctatcttactatatacctaaacctagaatactatacctaagactactctttactgtattatactacttatactcttacaatattagactactgtaatactatactatagctagaatactgtgcaccttagctaatatagtactaatactaaagtactataatatatatatactatatacctatagtatataccccgagagggagctacttaaatatatacttataatactatatactgttaactaatatactgttaactaatataccatactatatattatatatactatgtataatatactgagtatgtgtatagtagtatgtaaatatggtaccaaattaacaccttaacaaacacttttaacccctaaacaccactctatatcatcttaaaacaccgtaaatagtatatcagaaccctgtaaacagtactgtactatagtatttatacaccctattcactagccaaaaccataaacccagacacataataccagatacctataccttaaatatatacccctagagggagctactttactgtatacccctaaagggagctaattaaatgtatacccctagagggagctactttactgtataaggggagagggagctactttaactatataccccgagagggagctaattaaatatactatactaccccgtatatacacacatacacataaaccctatagaagattatagaagagccctgagttccgtggtgagaggcgtaagtcctatggcggtcaaaaagttaattgagaacctgatattctttggcgaatccgttgggaacattttttcaaacactgttttcacatcggcatcgtggaatcttctacacagtgtgtcaactcccatgttctgcgctaattcttgtaacaacacttttatgaatatacgaccagacgaagttgtatcctcctctgttaatcttattaccgtaagtgtctcccaactgatcccctcagtatagaacaaatgcgcaaagaacttggccacgttacgcagtttactcgtctccagtctgtgtatcaacttgtattgacgggagaaacactgttcaaagttgattcggtaggattgcctgagtttgcacaatcgctcagcttgaagagagtaaaagagttgaaaagtgcgttccatggcacagcagtcgatgagcatgatgcacacttcaatctccctgtcctcaatgttcaactttaatatcttatgcacacactcctcataattcaacgaagacattatacacaaataaatcgtcttccgcaaatttaccaactcctgctccgtataatcttttatcccccgttccacagtgttcacagtgtcattgtccacagtgtcattgtcaactgtgtctaaattgtccacagtgtcactttcaacagtgtcgtattctgaatcctcggatgtgtcggattcggaatctgtgtgagcgccggtgagttcctgtttaatcttgttccacttgaggttctctaagttataaacttccggttccactggctggaaaatatttagcatttcatccccagtaatggtctggtctaaaaagtcaatgtcgtgtgtaatttgatcttcttcctcgagtaaatccagttccttaggaattttatactctgtaaacccgttcctccagtgtttccacagtgcttctatggagtattgtgtccgtttatctacgagtccgcactgtaaaatactcttcagcctgtcaaacactgagtctaatccctgtttacaattttcgtgtaaaaagttccctacgtcacggaggaactctagtgccaattccacagaatcgtctgtgggcttttccagcagaattgccaacaactgtaatgcaagaatttcatgggctattttctgatttaccaagtgtgccacacacttgacgcaggactgacatacgattttatcattcctcttgtaagctctgcggaattgtagaattatacgtttcagtgtgagttccccgatctcgggaaatttcgagttaatcacggccaaaaacgaggcgtaaattggcgtgaaacctggcgacgccatctgcgccctgatccaagtcctcgcaaataatccacggcccctgatcaaattatgttctaacatttccaagactaactccgccacgttggtgagggttagcttgtttattgtcgagtttatgtgcttacgcagacgctcccactcctggcgctggtagtccacagatccatccggcaatatctcacgctgtaaacgctggagcttaaatggcgggacatatacaccaccagtcctactcattactacagagccatactgctcagtggtgttccctaagatacattctgtggtacgtttagaagtgttagattcgggtgatttactgaggttggagttggtggtattagtagtgagattagcgatggtagaggagttaggggtaggtttgttggtggaatcaccggaaattggcgatttcgatctcgtcctcattgcgataatttaattcaaattcattaaaaattattcaaattatgaaattattataaaaaaaattaaaaaatttgattaaaaatttttctgaaaattattaattggtaagagtatttggtaaggatatttggtaaggatatttggtaagggtaattgggtcaaaaatgtgaaaaatagctcaaaattaaaaaattccaaattccacaaattcataaaataataaaaactaagtaatgatataaaataatgatagtaaaatagtgttggttatgagaagtgttgaaagttgttgttgacagcgatgagcattttcccgccgattcccatgttaatacagtccctgtgggaaacaacgcctacgggcgtttgtagtacccaaaggccagtgttaaacctcgtccttgactttaactcgtgcggcgtcacccaaatatcacgactcggctttgatatcacacgcacgttacggatcacctgacaattattaaattaaattaattaaaattctgtgaataaattgtgtgaaaaaattgtgtaaagagtacgggagcgcctttgtaatgtttgagtagaatgttgatgcgatcgccgtggacggagtagcctctgatgtatccttcgttgagtagaagttgtagaatttgtacgtttagtatgtgataacgacaccactggctctgagtgtcagttttcaacagcggaactaccatctcacacatccgctgcatcgccacacaataaacacaatttcacacaataattcatttatttatttatttagttaattagttaattgagtgagagagatttggttagaagatttggttagaaaatttggttagaaaattgttagaaagtgtcggtatggaattgtcgggatttgtgagataaagttataaactgataatcttgtaaataaatttaaataataaattttgtaaaataatttaaatcttgtgataatttaaatcttgtgataaatttgattttgtgataaatttgattttgtgataaatttgattttggttgggtttgtgattttaatttttcagggctgtaacgccgatttagccgttttaacgatgttggactggttgtttttgtgttaaaacagtgagaggctgtttggcataatttggagttgtatcttttaattgaaattcatcagtcaacttgacactggccgaatttttcaaacattttcagattcactttttaattttttaataatttttgtatcataaattttcaccaaatttgaccaatatcatttccaccgtaagctcccctttgtacgtaaatatttaatttttagattttcaattttacctaaattaacccattttcaactgttaattcaattttcaactattaattcaattttcaaccttttaattcaattttcaactgtttaatccaattatctattttttaatttaatttttctaatttcgggtaaatatcgcaaaaatttttttacattttatatacattacaacatcaacaatttacttaattattattatttaatatatataaatataattatttaatatatataaaaataattaattaatatatgtaaaaataatataattgatggaattgtgtaggaatcgcaatggcgttggatcagaattatgattatttgtttaagatagtgttgattggtgattcgaatgtgggtaaatcgaacttgttggaccgttttgtcaagggtaattttaagcttgattccaagagtacaattggtgttgagtttgcgacgaagaatgtgaacttgcgtaacgggaaggttgccaaggctcagatctgggacactgcaggccaggaacgttacagagcaatcaccagcgcgtactacagaggcgccagaggcgccatcgtagtctacgacattgcctccaagcagtcgttctacaacgtgtcccgatggctatcggagctgaacgagtacggcgacgctaacatgataattgctctcgtgggtaataaaagtgacttgacacatttaagagaagttacgtacgaggacggggagcgctacgccaagagcaataacttgatttttttcgagacttcgtgtctcagtaatgagaacatcgacaccacattcactgagttactcaatttgatctgtgataatcacgagaaatttggcgataccagcgtcacggccaacggcgccaacgtcacaaagtcactggtatcactcgcaaaacccaaaaaaatgaaaaagaaaatggccaaatgctgctaatcttttacagtccacatatttacttagatttttagttttttaaatgtactttaccaaatgtgttggtgcagcaggaattgcagattattttcctctccatttgctaacccgatcaattttacactttatttttttagcctcaaatttgcaaatttatattaataaaaatggtgaatttgtggatagaatttgtcaatagttggaaattcctaatgatgttgtaaatgtctaataaaataataattaacggtaaactggggaaaatgtgaattttaatatgttgtggattgtgtaaataatgtgtatggatagttttaattgaatgtgtaaataattgtctagaaaactttcaatatctgaaatgccataaggtgcataaaataacattgcacatcaccccgtttacacattttccaaatttttttccattctaaaatctttatttaattttgtaaattatttattttatttgattaatgaaagttttaattttttttaactaattcccaaaatggaagattccacccctaccaccaatattaatactattaacactgttaacagtataaatagtataaatagtgtgaatggtgtgaacaagttggggatgagggggataacaacggagcatgcgctggtggctaaggaaattgtttacaactcattactatccggccaactctccccaaatcccagcggtaatctcattatcactccttaaatagttgttattctgagtaaacaattgttattctgagtaaacaatgtttataggagttggtagtcctgtaagatttaatagccttagctccgtcaacagctttaaagctgataaacccacatccaacattacaagtaaacacttattactattactattattactactatagtattagtattgctatggtattaatattactatggtatagcgctggtggaaaatgccgtaggaagctgtggagttgtcctgaggagtaatcacgccagtcctaaaaactccaatcccacaacaaacactagtactaacacagattcacagagtgtaaacactgaatgtgatagtattagaagtgaaagcctgaatggaatggtggtaacaggtagtcccaatgtgtggttaaacatttatgacttggagaatgtgcacagggtggtgaatgtgatcgcagacgtggtgggtgcaggcgcatatcacgcgggcgtagaagtctacggcaatgagtataactatggatataatcctaagggagggactgggatcaccagctcatttcccaagtatcatccctatcacacgtacatcaaatccgtagacctggggaagaccaaatacacaccacagcaagtctcggatattatcaatcacatgaaaccacactggaatgcactagactacaatattcttcataagtattaacaatagtattagtacagtaatagttatagtattagttatagtagtagtttatagtattagtcatagaattagttatgtttacttagctccctgtggcagtcccccgcctcactactatccgggccagttgtcgcttgactttggcatttatatgggatgtgtattattcactgtactattacaactatggtagttagcacaatcagataatctccgagtacactactgtaatacgtagaatagagtatggaggataatggatggtattaggaattgtttgaattttgcgaaggagttgtgtgagagattggaggttgggaggataccaggttgggtgatgggactgcagaacaagatcaactggaccaagagaaacctcaataaaacaactaataaactcaaagtatacacaaacacttatcccacagattcttttaggcatcaaataacactatcactgttaacactatcactattaacacaattaaaggtgtaataatagggcaatatgatatataaatatccaattaataagtatatccaatgtattataaagtttataacagtagtttttatcgtaattgtaatgaattgagtaattgtgttggtatccgaaaagtgttaaaacttggaaaagtagtgtaaaaatgtgtaaaagtattagaagtagtgtaaaagtgttagtatccgaggattagttgtaatcgatagattcaagattgggttgttggtatagatcatccttaatctcatccacaggcgattcactattctcagcctcaaatacatctgcctcatatctacacagcaatttaatactatagagttatatatacatagtaatatatactccagtacttaactatagctaaggggtactagtctacagttaattaactataggtaataggaatactagactagaggtatttaggtataggtaatagcggtactatatacccatagtacatatagtatatacttaagatacctaatactatatacccctagagggagctatcttattatatacccctagagggagctaattaactatatacccctagagggagctatcttattatatacccctagagggagctattttaactatatacccctagagggagctaacaacataagggtagagggagctacctaactatatacccctagagggagctaattaattatatacctaatacctacagtatctatactatatacttaactactagtgatacgtgttatcttgatcgatgatttgttgttctatggaatcgttgagtcctagtttcttgaaaaattcgctcattggaatatgtgtcagttcgagtgtgttatctacaatcttcttcccattcaattctttcattgcattttgcaccgattcctcatttgtatactcaattaacccaaatctccgatcacccttgataataattgaggtataatgtacatccccagcttgacgtccgaaatcctttaaatcctgccagcttacgctttggtcgaggttggacactgtgatttggaatgagggtttagggtctctagaggacagtttcttgttctggtcaatgtgaggctggaccttgagataagagccccaaatgaacttgttatgcatttcccgaatcgcggactccgcgtccttactgcggacatagtcaataaacgcaaatttacgcctgaagtcaatccggttaatcggaccaaacgaagagaattttgacgtcagctcctcctgagtcacgtcaccagataaatttccaataaatatcttcgtcctacgcacaggctttccagtgccataaccacgcgcagagttcagagaactttcctccaaattatcataattactattgtaactactgttataattactgttgtatgaggtattgtagttactattgttataattattttgttggttatgttgttgattttggttgggttggtagtggtttgacttgcggattggtccggagtttcgtgcgtttctctgattatagtttggtgggtacggaattgtctgattcctacgatcatacggacccgctctctcacgatatctacggtcattagggtccctcatgtccctattatactctctagtgttatctctatagtctctattgttatctctattatccctattatccctcatatccctattatactctctggtattatccctagtgttaatgcggttggagtaattgtattgtgtggaatccctgggggtttgatagggacggggattgccatagttatctctcttatatcttatatctctgttgtccctggtatccctagggttatctcttaggtccctagtatctctgtagtctctattatccctaggattatccctagtatctctgtagtccctattatccctagtgttaatattcctgaaatccctggtatccctgggattgtagtccctgttagggtaatccctggtaccaaaatctctcccactgtaatccctgttatattccctattatctctgttattattataatccctgttgtaatccctattattgttgaaatccctgttattattattataatccctgttgtaatccctattattgttaaaatccctgttattattataatctctattattattataatcccgattattattgttgaaatctctattattattattattgtaatctctgttattgttgtggaaatctctgttaatgttgttgttgtggaagttatttctggtgcgtgtgttgttgttgtttttgaagtgttgttcgttggaatcgtctttgcggttataattttggcgtgggtatcgttgatctagattagatctcatgttccggttcctcatcatggcgaataattacaaatcctaatctgaaaataatttatgtaaaattattatgaaaatagcgaaatgtgatggagaaaaataattaatataatcaacgtcataccccatccagatggggaattgacaaggaaaatacatcaaaatcatcaaacacagtccaaaaacataaattcaaactagtaaatattaattaaaaaaattattaaattattatagtaaattattttccacagtgtttacgctgatttattcacatttgttacacattccaaggaacatccagtttacagcttagttaataggtttttagggtttaaattgttggaatttggtgagttcagagtcgattaaatttctctccagtcttacctaaacaatttttagttacgccaaaatgtgtaatcaaccagaaattaacaataattaccacaaaatgactaatttacggctaaaatatactaaaattatgtataaactaagagtaaaatgagccttgagtaggtctaaatttgtctaaaatatctaaattatgactaaaaatatgtctaaatatgcctaaataatgcctaaataatgccttaaaatagccttaaataacccttaaattagtcttaaattagtcttaaataaacccttaaatagtactaaaataagcataaataaagcataaataaagcataaataaagcataaataaagcataaataaagcataaataaagcataaataaagcataaataaagcataaaatagtactaaaatagtactaaaataaggctaaataaaactaaattatgagttacttgttcaattttctgctgtgtttttgcgattttttgattaatttggttgatattatttacgagtgacatgatttcccttgtgactttgaggtaattttcaatgtgtttaacgcctgaaacgtccagtaacacgggcgcgtagtccgaattcccctccttcaccttccggttaaacgcgtcaactattattaactttatcgaatccctcagtaaatcctcaaacccattctccacagacacctctccaaacacattctaaaccgtacagagttatccacagtatataacagttacgagttaactaaatactatggagttgagttaactaaatactatgttgttaactgtgtaatagtgtagaataagttggagatacgatgagagattcgcgtagattgaagagagattgtagcgcttcttggacgagttccgggtcattatgatgtagaataagttgtagaatatgtttaaagctgtagggtttcgggtcatttttagcgcttaacgggtccttggtggaagaattgctcagcgaattagtgacaaaatttgcaaactcttgcgtgaatgaaatgttgtataatttctcattgtagccaaacgagtaatcattagactcggaaaaaataccattccacacacataacaattcgtcaatcatcaaaacttttactttatttattaaaattatttaaaatattaaaaaattataaaataaattatttattgataaaataaattatttattaataaaataaattaattattgatagaataaattatttattgatgaataaaaatattattgggtattgaagttgagtgagttgtgtttgagattcttgaagattatgggctcatttgaggcgttatgagagtgaaatagcgcgtgtacgctgggatcaatagcgcattccataggtattaaaagctcaaatgtactttcaatttccttcctcatgaagaggtaattgagcacgtttgccctcaactgtatggagaataataccctttcaaacttaacacagtccatgtaaatgcgttttatagtgtttaactcagcataaggaaccgaataaccaatgttccacatcagttctttatacctaggaccactgaaatcccatccactcgtgcccatcgttatctagtcacatatacaaatcgtgccatagttagatatatactactgtaatgtgtaagtgtgtaagaaatgtgtgtaagaaatgtgtgtaagaaatgtgtaagtgtgtgtaactttgagatcagagagtttgaagaatgattcgttgttccggttaattgtgttgtaaatcctggaaatacttgaactgtcactcatcggatcaaaatggtaatcacctacaaacgtaacagtgtgtaaaatagttaaattagtgtgtaaatgtgtaagaaataaccctaaaatacgcctagaatgtgtaaaaatgtgtaaaaatgtgtaaaatgtgtaagtgtgtaagagatactggagtgtaatagcatgcaagagggtcgttccccgattggatagtagaaaagatcaacgtgttgagtttcgaaggtgattggaaagactgaagtgttgtaaactgcgattgtggttttaaagtttccgccagttaagattgagtcgccatctgatgtcatgtgccaaacgttcacttgctcctgtggatactttaaaccaacatgaataaaaggctttgaataatataagccagccagtgaacctacagattaatattatcgtaaaattaataatatagtaaaattaataatattattgtaaaattaataatattatcgtaaaattaataatattttagggtataaattaatataatttgataatttcagtacctgaggagagaataattaaaactaaagtgatgtgtatgaaaattaaaagtcttctatagaaaagctcgttcttcttacccatccaacattacacagtcaaattattcaaattttcaaattttttaattttttcaaatttttctaaaatttccaaaatttaaatttctctaaaaataaaatattaaacgaataatgaaattatttaaattaatataaaaagtatggtgtcggaaaaataatttattatttgatatgacgcagtatgagaggataaaggagcgtttgaggagtataaatattaagaggaataagaagcgcgtgacagatgtaagattacatttaacgcagtacttatcccatgtgatccctttatcttctcaacgctttattttatcgccccttatccgagcctcgcttctctcccaaattggatcatataattttattaaactatttaacattaggaatactacgccagttaacatttttaaaggtaatttgctcccaatcacccctaatttcgccttatttagcccacaatttcgtcttgttactcttatatttacgctataaatatagttacagtagtataataatgtgataggaactgttggaatctatgggtttaagggattatggaagggtacgacatcgcatgtgttatctggagtaatatttccaagtgtgtatatgatctccaaatggatatcaaatgtaacatatgtgccatactacgataaacccaagggacaataccttaaaagatatctcgaatcactttccatctgtacattctcacatctcttcagttatcctcttgatacttgctataccagattatcctccgattataccaattgtagtattaagaagtatattagacatattatacaacaatacggtaacatacattagtatagttaagtagtaatagtgtagtgagtagtacggatccctggtgaactccaaagtcaagcgacaattggcccggatagtagtgaggcgggggactgccaaggggagcttagttatacacaattaataatacaattattaatacaattaataatacaattaatagtatagtatggaaagagttaaagaattgtataggagttagaaatttgtatagtggattcctgttgtgtttattatcaacttcgacacatttgatgataacactgccactgaaccagcaaatgcagtacagaattatcaacagcgtcaacgatgaaatcgccaaaaatccaatcctaaaatcaaaccccaaatccatcaaacccaaaggtataaccacacaatttgtcaatttacaatcattttatgtagaattgaagcctgtggagttgtatccgtttaacttaattttcgctactttggtgtcttttgtatcaaagactatcacatatccaattgacactctcaagtattttaacccttgtaacaatattttagagttaaatatcagtataacacacgagaaaactatggatataagcgttttttcgcacaaattaaggtaaatcaagtgtgtataacaatttgtattagcaatcgggagggtttagtgtgagaaaattatatgcgggatttagtatgaagtctgttttatttcttcctgagtgccttctctacggcacactatactccgccgttgttaaattcttatcataactcacacattaattttttattctttgtgttaatttattaattttatttaagaataaaattgtgaatgttattgagaaggttgaattatgtccagttgagaagtgttcaatggagaagtatcgcaatttggaagccgttttcaaggcctaaagagaaacctcagagtctaacatatgaaaaattaatttatccaaattcaacagagaatcaaaatcatatatcaaaattatggaacgatattaaacaaaatatactcatcgactccgtaaacaaatattatataccattaaattattaaattattaaattaaataaaataaattttatgtttgtgagtagaaggacccggatgaggaggctgagaagcatttccagttctcggtacaaaagttactggaatctcccggaaagttcactttccggaaattctccatatacctccacgtaaccaatcaattattttatttattaaattattaaattattttttaaaattattagaaaattgttaaaatggttaaaatttttgataatttttgtgttttaggagctgtgtacgaaattgaagttgataggtaaaaaaacacttcctgaagaccaaattaccggaacactcctacaactcagaaatcaatgtaattttcacacagtcccattattacactaattattgtacacactactgtacacactactgtgaaactgttgcacattacttactaatgtttatggtttagataatatgatgtcgtatttgactgaggaggagttggactctgacactcacaaagtcttcacattcgacgccaaaaaactcatcgcaaactccttaaacgtatcatcactctaacactaatgtaaatctgatttagttgagaattgaggaagtggaggagatgttgatgcattttgacacgtgtaagattgaccggacttggtactttagaagattagtcctaggccggaaattaccaaccagttacaaagaacgagagttcctctcattccaacgtccaacacgtatttcttacactattaaactctgttatgtatttgattagtgagactggcgaatcaagtgtatcctgaagttgacaatttggagagtatgcaaataaagaaaatcagagatgacacacattacaacaggccaaagtatgtttaatcttatgtattttagtgtagagggaagacttggccctggttcagacataaaactacaggacacgactacttcagaacaagaccatacactaaatcatacaaataatttaactaattttatatataatttgatagtaaattactatatgagagggttgagatgtttgggattgtaggaaatgtgttgaatatcgtccaaaaggttgaaggaaattgtcttcactggagctccacttagctgtggacccaatcttaaaatcatgtcattggctaatttaggcgtaattggagctaaataaatggaaatgtaaagtaaaagtgtgcagcaaatccaggaagtatttaacaactcagactgtgacgacatggtccagaactgagtcaactcaataaacttgttcacctccgaagacatttccactaatatttgtatatacctgtccaacctaaagctttgtacagagtttctaatttcttcagaatatttattaaacttttctaacagcttgtggtcacaatcacagggctgaacagtgtcaactttattcatctggagaattgatgtaactctgtagaaagtgttggcaaatttattcctgagggtttttaaggcgttgtcaaacattgaaggatcaaactcaaaatcataactaaagtcacccaagttcatcagagcaaatctcgagacatctgatggcacagatgtgttcaggggtgaaatagagttgttgagggatttggaaatcttttcacccttgttcaggagccatccgtgtactaaaaatcttaactttatatccaattttaaggccatcaaaattgctggccacaggatagtatgaaatgttaagatgtccttaccaatcacatgaataatttttaacccattaagattggagttactctgttccagtgggggaaaagagtgtaaatgtgttagataacctaaaagagcatcaaaccatacgtaaactgtttcgttcccactgttagttattggtatgccccagtcacaattggatctggtaatggcaatgtcgtttatttcagactgtagtaatttcctaacctcattaagcgagtgctgaggtaaaatcacctcagaatccttgaaaaattcaactaatttcctcttccaaatgtctaatttaaaaaagtaagccggttcatcaacaagtgttacatcaaatcccaggggtgatttcccgttaattagcttagactctgtgtaatacaagtcctccttaggggaaaagtaacccctgtgtaatcctctgtaaatatgtccagactccagaaaattatcaaaaacacgtttgaccttagatttatgctcattttctgaagtgtgaactacaatttcgggggtaatatcataagctttataaagtttaaagaattgatttctcatggaaatgacatattctttaggagaatagccgaaattggcagcggttgtcttgatcttagaaccatgttcatcagtgccagcgagtaatttacagtcatggccactgagaattaggaaccttttaagcacatcagaagatactaatgtgtaagcatggcccaaatgaggtgggccatttaaataaaacaacggagtagttattaaatatttgttaccagaagatactccagggtcagaaaaaagatttacagaaaatttatcatttaatctaggattaagtgagtgatgtgttagaaatgaagaatcccttttgaatgtatttggaatccggaatgagagtgagaaattgagtataatcaagtgaaaaaataaaattttagtaaaatttacactaccattggcattattaaacagaatctgcattcattattaaaaagtaaaaataaccaaaattacacattaataaatattagtcaggtcaatccaaacacacaatctccactccataccattttacacaatataataaataatttttaatgtaaaataaatgttaatttttataatgatttgtaaattgtaggaaaatgttaaattctaagggatccgaggaatctaatttggatcgtctaattaaagctattgatacagataaatataataaaaggaaacgagaaaatgacttagaagatgaagaaattgctgataattttgaccttctggaggatacagatgaggaaagtgatgttgagctggaattcaaggggaaattaatcgaaaaagacgttttcaacacgtttaacgaggattatgaaacatttttaagctcaaattctaaggatttggtgcctgtaatgatatttgatcatccgcttttttcctcatataaagttaaaaatgtgacgcctttaatgaaatctttattaactatagaaaaggtgccagatcccctaacttgccattcggaatactttattaacgccgtaatatccaagcgactgaataccctggccaagggtaaaaaactggaaactcctcccgatagtgtaaaatatttattttcatgtttaaattcatatgttgatgttttttatcttaataacaggattagagatttggattctgtgagatttgtttacgctttacacatcgcaaatcacctcgtaaaaagctcagtaaagaaaaaagaatctaaagaagaaagaactgaaggctttacaaggcctaaaattcttgtcatctgtggcctcagatgtatcgccaaagacgtagtaaccaatttactcaagctcattccagcctcaaaatctgtatgcaccacacattaattattcataacaaaaattaactctgataactgtgtaatttgttgtagaatgtgaatttggatcggtttcagtcggatttctcactgagtgaagaggatttgagggaccaggaggaaagctatgccaagactaaaaaggctaaagattttattaaaacgtttactgggaaccaggatgacgcttttaaaataggaatacgctatgaatctggactactacacctctactcacccttttactccagtgatattatcatcgcatctcctctaggcctaagacctctcatatccggaaacgtattatccacagttttatctgtagtattattatgttatcccccttaatagtgttaatagtgtaaatagtgttgataatgttgttaggagttggattatgatttcttgtcttcgattgaggttttggttgtggacagattggacataatcaaatttcaaaactggcgtctcttcacagatctcttcaaagtattttctagagttatattaattgtattactgagataatttgtgttagatggtgaataagcctttgatgaagtggcgtgacggtgatataaataagataaggatgagtgtgattgacggtcagatagaagagtacaggcagaatatactaatttcaagctccaggagtgtgatttttaactcttttttcaagaatctcaggaataaacggggaaatattagactatgtactaataggaaaactgactacatacgactcggaacaaagcttaaaatacaacaaatgttcatcaaagttccctcctcaaacattaaagattctcatactgtactatacatagttattatgtattaactatactataatctatgggttaggagactgtgaagtattttatggagaatatgttggcgaatttggaagatattaacggagtcctagtgatcctatcagattacacacaatatttcaggtaatcagactaacctaagtaatatttgattcagtttatctaagagattaaaggcgtcgaatgtgcaatatttgacatgtctggaatctgacacaccaaaacaaatgaaattcgcaagacaacaattccaatcaagtaatcaaataactattcattgtagtattaagtatacaactttggtctgggttgactcaggagataataccccttgtaaataatacccctaccagagcataattatataaccaaataattattatgattagaggatatcccgatgatgataacgacgttgcgattgttattttttaagcgttatttgttcaagggaacgtcgaaaatattcctgttggagccgccagagtatccacaactctacaaagatctcatgagaatggtggatccgagtagaagtaataccatcgtgtgttattacacgagctatcacgccatggtactggaaccaattgtaggaactcgtagaatcgccaaactcatcaacgctccagacaccaaaatcacacagttcaactaaataaattgattcaactaagaattaattttatgagttgttaaaattccaaggcgtggagataaatttatgaatggtgctgagatgtacaaggagcaagaatttgagatcttttagaaaaataaatttgaatatgtacaataatttaatttgttattaatttattaatagaattctataaatattttacaattttaaataattttaaataattttataattttagaaaattttacgaaataatctattctagattaaaaatgcagaatccagctgaaagtaataattccagtggtatatattactgtcactactgtaaatctaaaagaactgagaatcagcttgacttcttattatctgaggaaatcaaatgtttagaatgccaaaccataggatttgtcgaaaaggtataaacaaaataataaaataattgttttaggattatgaagaattggaatcttatgagaatgaaactgggtcaggaaatactttttacaccagagtctcacaaactcaatcctctaatcccttcaattctgaacactttggttcagatccttttagttcaatatttggagtccctttgaatacattcattagtgacctgtttcaaggttcatttgctatcccaatgggcccaacggatagaaatgtaccaactgctagaattgttcaaactggtagaaatgtaccaggtggtagaggtgtacagactggagtaagattccctaatctccaatcaatgttcggtggttcattttctttcggacctttcaccaggattaacacttcttctgaaattaacccagaagactttgctagggtttttagaacatttgttagtgaccctttctcaagccagtcacttaaccaggttttagagttcattatgcaatcggatccaaatagatacggctcacctccagcctctaaagaattcattaataaccttaaagttcacattctaaccgaggaaaccgcaagtaattattagataattataattatgtttagaggagaatgaaagttgttcaatttgtactgaggagtttcgctcaggagataaggtccactggttaacagataacaaagagctttgtaaacacacatttcacgtcgactgtattattccatggcttcagagaaggaattcatgccccgtttgtagatttgaagtacctacagatgatgaaaactataataacgagaaggagctgctcaggacccgaatcaccgaagaggttcagagaaacctcaacacaaacactaacaacacgaaaaataattaattccatccatttacatctttaactttataattaaacagtaaatattataattaaatggtaaatattataattaaatagtaattataataattgtataaaagggctgttccgggaatcgaacccgggacctctcgcacccaaagcgagaatcataccactagaccaaacagcctagttagaatattcaaattttattattatattaaatccaaatatatattaaaattatataaataaacgttaaaatatatgaacaaaattaatatattaaaatggtaaaataataaaataaataattggaggggcaggatgcgattatttgatagatttacgttcatgtactttagctaggcttctccaggcccatacgaaaaattctggattttttttaacaattctcgagccaggttcgccggaaattacctaaataaattaatggggagaggaagactaacagttacacattcatcgtctattaaattatccatcagattctcataaatcgcccttaatttatcaaggctatatgaatactaaaaattaatttaacacataattctcatacgtctagtacgtatttcccaggattctccaagtacctacacaataaaatataatgtgtaatcactggtaacacgtaaataaaaagtgattaaatatattaaaccaggagagaagagttttttcatcacaggattcagattcacatttttgaacgagatacttcccgatatgatatgcgaagtgaacataggaattatattctataacattactcttgttagaattagaatcactcatgttcaaatgataataacatttattaaaacaaaataataatttggagtgcaatcaccatataattaatatatataaattctatgtaatggacgtgatcacacacaagatctgaaataacgtagaattaactcctcttgtatatgtataaatattataactttagagtctcaggtattaaacgggctgctccgggaattgaacccgggacctctcgcacccgaagcgagaatcataccactagactaagcagcctgacgaaagagttcaatttttgatttaaatttataaaaataattttttaaccttaaatttaataatttagattagaatctaataattaagtaattagacctgaaaaaacaacatcaattgaaaatcttcaaattgccataaaataaaccattataatatcaatcaaatgttttaaactttttaaattaatgatatttggatgatttctggaaataaaaaattgtaatgagtatagattaaaattttggggtatgagtctaggttgcttggtctagtggtatgattctcgcttagggtgcgagaggtcccgggttcgattcccggagcaacccttttcactaaatattatttgaaaaaataattaatttatccaacaatgttaaaattaaaattttaattttagttgcaactaaaatgtgtaaaaatgaagaataaaaatgaaattgatataaaatcgcatcaaatgcttttagcctttggatctgaactcattcaagtttttagttaatttattcatgaattatcttagaaggctgggattctactacaactccacgcagttactatcgcatctggacagtcaattctccataaattttacgcataccatagccttaaagattttaatataagagtaattttacacaatattattactattttccataggatacatcagcttcttgttgttttttagcctgtaaattggaagaaaatcataggaagttggaacaggtcgctaaaattttcgaatttttaaaatattacgaagatgaaaataaatgttataaatactcaccagaaaatgaaaatgtaacacataaaatacatattttctttagatgttgaagaagaaaattttggaaatagagaaggaaatacttataggatttgcattcagacttgataaaatcattgtttcacctcatagatatatcctacagtatacatttgctctttttcataatttggaaaagtacagctcccacacagtggataaacttgctcaaagagcttggggatacttaaatgacaggtacttctctataattttatgaaattattagtatgagaacttctctctgttgtatgattaaacctagttccatatcagttggttgtatataccttgcagcaacttcactaggaatacctctcaaaaaggtacacaattacaatatttatccgtaggaaacaatatttatgtacaggagacgatgtggtttaaggtatttgacactacttgggacgaaattgttactgtttgcaaggctatggactctttatacgcactgggaaaacctaaatatttaaacctataatcaagtcctatatactacgtagaaagaactaagaatgtgaaaagattaaatgttaaatcaaaacatcaaataattcctatattacaccgttaattcctatattactgagaattccgttaaagggataaatcatccaaaattataaattgtggtctttagaaaataatgtacaggaaagcttgtaagaatacgataaaaaggcttggtaagtgtgctgaatctttctttttggccgttggggaacctgatttggaattcgtaggcgagaattcgttcagccttgtacgatacttgacttcacttatcttagtccagttctcaccttctctagtgtaatactcatggatggtagaggcttttttggtaatgaacaggtgggccagtttcggcctaccggtttcagggtacactatgacgtcagtacactcagagttattgccttcccacacctgcaacttgccatccataacctttacaacccttttattcggtttaggagtaagctttctacatggaagaccgtcgatgaagtaagtattagaatttactttattcaaatccaaggctccagcagctccggagatatttaacacgatattctcacacttgcagaagagcaatttagcaaatattataactgtcaagtagataaacttagccatgtgtgataagctaggaaggcaaaaggtaaatgtgtaagccattatctatggggaattagaacaatgtaatacaagggaattaaggtgccataggtgaagaaattgtaaaaaacaatttaatttaaattatccattaaaaatggactagtgtgtatgatttttatcaattttatcgagtcttccccaaagaaggggaaaactaaataatccaacgacggcgctggattccaaactggtcccactctgttataccatattaatactttaataaatatacataaaatgttccataagttattatttctagctggaaataaatgtagtggttttccaagaaaatagtgtcgaactacactacaaccaataacataactattatatttttacgttatattgaacttattatacattattttactaatatacacaaaatatatgattggatagggtataatgagagttgtatttgtatattaaattaaaacgtaaaattgagattatctcatggacaaatcaaaattggataattcaacttaaattttaaacattttcaaaaactgcattttctcaatttaaatatattttattttaaatctttccaattcacttttatccgataaaattaatgcgattgtccaaaccaataggaaactaaaaatgttcaaaatgataatctaaaccttttttgaactcaatttactaatttagagaacaaatggacatgattaaaaaggcgtaaaaggtggccattgttgtgaatgagcccttctttttctcatctggaacagggccagagaagtttggatctcttgatttggaactgaggaactctttgtaagatatggaagcccaggtggagattgtattcatgaagtaaaaatttgattcttcatttggctttacaaccaaaattgcaattaaaaaaggcctgtcatttcttttatataagtcgacgtgtttacattcctgtttataagaaagtctttgccatatgaaattataattttgaatcacctttgagattaagtagccttccttcgccgttattcgctgaaatgacacaccgtcttccttgagatcctcagatttgaacatttcgtcgtctaacgtcttcccaatgtcaagagtctcggccatcttattcgctttgcaaccatagaacaataccgagataatcaaagttgcaacgacctgcattgttcgagccttctcaacgcctttccatatgtgtagaaaataattccgtatatccaagctaaatattaaaattttttccagcaaaattggaaaccgcgtaaaaactacgtaaaagtagcataaatgtgccgattaggaatgacataggtggggaataataaataatgtaatcaactcaaaacatgaaaatatatcaaaaacatatcattttaaaattatattataaaataaatttataaataaagtgaattaataggaaatttaacagaaattgtgttatgagatcgttgctgatcaggagtctctataattacttaaataggtcattttaatatagcaaattattaataattatttgaaaataatataattagtgatattccgcatgaaatcattgttactgctttagcttaaatttttatgaaattttttgaaaaaataattaattgattgattttagttgttggattccccttttcagtattattagtaaattaaaattttatcgtaaaattatttatttagtggttttagacccgatatggtgtcgccatcataatgtatattctatgtagttgtttgacatggtttattcgcctgtatcaagccatggatttatacttttaggtcttttatctttgttaacctcagcctccctatcgttttcatattacgccagttattttcttttgtttcttttagtttttgtagtttatttcttccgagatccaaagagatctgttccttttgatgattccttagttttaagcccagcagatggcacagtaacttcggtaaaagtagtagattcccctttgggagacggctcgaaattgaccagaatttcagtttttttgagcattaccaacgtacacgtaaatcgctcaccagtaacaggtgttgtaaaatctgtagaatataagaaaggcaagttccttaacgccctagacgaagattccgctacaaaaaatcaaatgattcgtacagtattcaaaactacctacggggaccatactctcgttgtagaacagctcgcaggtcttatagcaagaagagtagtttgtgatttagaccctggtaacactgttaaactcgggtccagaatgggaataattaagttcggaagtagagttaatgtgttccttccaaaggatatgaagccgctagtgtccaaaggccaaaaggtaagagccggcgaaacaatattcgcatacatggaccccagattgaataccaaggaactcacataccacgtttgttgataagttgtaataatctaatacacagtttgtatacattggtgtaatatattctaataattctaaaatgtagacaaggagtgagtataacattaggtgtatgtccagtttaaaatagtgtaatgtacaaattcccgtgtttaaatattaaaatacaattagaatactggattaattaaaacgatggagagaaatagtctagagcatcagtgaagcaagggcgtgagtaacagggtgagatggtaatttgttaacaagtttaggtaatagctcccagtgaactctgtccttgacaaaacgaacgagattctcatcatgaggtggtagaaatccggaaacaagattatgtctaacccagtcaccagtcttagggtccctaacaaagccagcagccctgttagtcaaaaatccttcacctttaggtaaccaaaatgtcaaatgaagcgcataccaagttttgcagtcagaaaatgcgattagttctacggtttccccttctgtagtatctggtacagtaaatgagagaaaaactggtctgaccctgcctggagttgcaaatccaccacttaaatctgaacctaatttaggaacaagatgcaagaacctgacaacatgaacatcatcagggtctttttgcataataactgaaactggagtagaaaacgccactctgttatctaatgcaccaaacttgctctccgtgtccaaaacaacaggtttagaatattcacgaggtaaatctttttcaacaggtacagaaggtacaaaaggtggagaaggttgttttggtaaaacagttgacaatggtacttctgtagcaaggtgaccagcaagtgcatatgtttctggatgagttgggagtagttcaagtagtttgggcctgagttcccaatgaaccttgtcctttacaaattcaaaaaagctcaattcatataaatctttatcattaagagtgggtagataacgtttattccagtcaccagttttgggatcctttaaataagcaacagctcttgaggatggagcggtgtaatttggagcccaaaaactaaccatctcagcatgccaagttttgcaatctgaaaagcctaaaaactctaaaagttcttcgccttcaaactgaggaacagtaagtggaagaacgtgattctgaagcataccaggggtggccaagcctccagacaaatttgctcctactttaggaaccaaatataaaaatctaaccatctgagggccagattctttagtttcaactctagccgtgccatgaacatgaaaagcgatcctacggtctttatctgattcagctccattaaacagttttgaaaggtcaactggtgagtttggcacatgaacaaagggaggaagagcaaatactccaactgtaaatatgtaccataggaaaataaacacgcccatatgagttttacatcgaagaatgcccaaaaaaggggcaatataggataaattaaggaagaataaattaacaaaaatggggtgataacaaaatgaaattgttccttaaataaattaattaactaaaataaacatgaatttttcatttattctaataagatttgataaaacttattttattctcaagttactgtgacgatttactgtacatttaaaaatatgagtgattctaataacgtctaaattttcaagtctatttctattttaattaatcttcacatctccatttagacgatattttattttattaaaataatttattctttaaccgtttaatttattttaagttaaataaacaatctgctgtattttccaggactaagcttaatagatctaaaaaaaatacatatataattataattgatttaggtataattttaaatttttttaatttttaagttttttattttaattaattttatttgatttgttttattatagaatcttagtcaggacatatctaatgtatcattctatcaatttagtagaacaatgttgtttcaactgattgtaagtaaatttaactaatgtgttgtactatacttaatcgatgtagctaaatgtagttgatgaattagcgaaaattttgcgaaatgtttgggaaaggtatgtttcaaatctggtaaaatcactctaactataccttcacttaaaacacctagattcccataattttatataactatcctaaatgttaaatattttagatattgatacataactatctattcttcaagttactccgactatcactggcgttgagatatcaggaatatgaggattggtataagttctgcaggtgccttagcttcctttctgcttgactagtgcgattagacttattggtaagtgagtaatttggtttgatatttcagtttggatgcttccccattccactactatgtctaaccaaagaatgagatttttgttgcattggtaacatgaatgaaaaaatggattataaccgtaaatttattgttttatattacattggtcgctcaatggaaggctgtagaatcggcacagcctccatcaagtggcagtggaccacctaagggtggtggctccactccaaaccaatcctctacacctaaatcgcaacctacaactcaagctaatcaatcgcaatcacaatcaaatccaactaacgcaacaagtgctagtcctactccaggaactcagccatctcaagcaacaccaaatcaacccaatagtcagccagcaaaaaatgcatcgcaacatcaatcaagtgcatctgcaactaatgtaacgagttctgttacaggtcaagccagcggaactcctgtatcaagtggttctaccaaacaagttacccttgatatagagaacaaactgtccacaacagaggtcgattatgccaagaatggtaaatatcctacatatacagcgaagtctggctgtggatttaacaaaattgtgaagaaaacagaagtcatttgggaatccaaagatgtctgtggaacaatagtagctactaagggcaatgataatgttgcaatatttcttgagactggtggatgtatagtactcaaaaagtctagtggtaaatggaatgatatatccagtcagaagcatgatataacgagacttaaattctatggtgaaaatgataatgagatcacttcatctaattacaaggttaaagtcctagggtattcaagcagttttgccttcatttacgagttcagcgaagttaaatgcctgaaaatcaaatttggagataatgatctatggaaacatacggacgacgatgagtacaaggatattactatgtttcaatttgatcctattaaaaacgagctatatgtcgctaagaacaaaaataagtataagaaaatagattataaagggccgctagctccacctgctagtcaaccaggggctaccactgcaggtacaactcaagctcaaccaaagggagctacaactactcctcaggctcaagctccggctactcctgctgtagaggctcctaaggtagctccttctagccgacccgtaacacttaatatcagtgggaaggccagtactgaagactacgattttaccaccgatcataacaggaatattaagatttacaccgccaagggtagttcaatgtttaacaaggtcgtcaaggatgatacagttatttggacgaccaatgacagtactaagtatgtcactaaggttttcactgatggtatcggtgcttgtgccagtaccaaaaatgtgaccatatatctgtttaacggtcatatagaacattattggaagtcagacggtggatggcagaaggcttctaacaaaatatgccttgacctaggtaagacctctagtaccattgggtttgactttcatcatgatggtgaaaaaaggacattcactgcaaaacctggatacctattcaactccgtcatcctcagtggatgtatgtctggtaatactttttggcaaggaggaactgacgaacggtgttcaaggaaggtggtggtctatggtgtcgagtcaagtattaaaaacgttaacgtatttttggaaaatgaaagagttatacacgcccataaggttggcaggaattggatctcatcaactggctttactcttgatatcggtaaaaattcgaataatgacctgtttgactatagatcgactaggggatttggtcactttaatcctaaggccaatttgtcaatcactaacattgtcaagaaagagcttaagatatggtctgcgaaagatagggactatggcctcaaagtagtcttaatgggctctggcaaggatgtgaaacatatgtcaattctgttggagagtggaaagtttgtgctccttaccaagagcggtcagaataagccttggcaagacgtcactcaaaataaacataacttctctggggtaaggatgttctctctagatgagggtacatcaaagtaccatcaactgactaaggaagattatgaacctatagttttcgagtgtagatatggttatgagttcaaaaatgatgtcaggtgtgtgatgatcaccaatatggatatggtactgtggagccacaccgaagacacggagtttggttatcctaagggattctatctcgatcttcgtcaaaacaagttcagtgtcacaagtcttaaagatcagacaaaggaagtaactcccacaaaaataagtgccgcaatttctgttgctactcctgtagttaaagttccagttgctgaaccagtgaaagctcctgtagctaaagaagcaatagtgacccctaaagcaactcttgtagcaggtccaccaattgttaagttatattccagtaaaccaggggaactcacatgtaaagttgagaaagagtttgacgattttgattattatttgcaggatcttaaatgtgaattgattacacatgacggaaactgtgtttggaaacatgaaactggtaaaccctacccaaggtatatgagctacaacgaggaggactgtaaaatagttgtaagtttcgaaaaggagtactatacgtgtaccatccaagatagtaagtggaaatcagtgatacgtagtcaagacggtatgactggtggtattggcccatcatacgcatttggtgatacctctaccttaactaaatcttattcaattatttcaactggagacactactaaaccaactgaggctaagacagtcgccgctccagcagtaactgctccacccacacccactgaacctaccaaggtggctctggacattgagaagaaacagaccaccaccgagtatgactacaaggatgagaacggagtggtcacatacagtcccagggataaccgtgtgttcaataaggttaatgagggcgattatgaaatttggaaatctgctgctgatgtatttggtaagctggtaaggactaaggaaaccaagggtgtcaattaccttgtagtcctactaaccaatcgtacattcagtttgttccaagaggcgcaaaatgagtggaaggatatcaccaaagagaggcacgatgttaagaagctaaaattctacggagaaggtgacacagtgctgaaggagacagactacgatgtaactatagtagacatgtcatttagtcacacattcaaaagtggtgtcaattgtaggagggtgttgctgggtcaagaggttgtctggaaatcagatcacgatccaaagtttcctacgataagtgcgttttcactaggtcttgcttcaaactgtttcttcattaagaacgcctctggtgatgtcaagaagatagaacccaaggtagaagctgaattggttaccaaagtgactgcggctccggttaaagcagaacctgctgaaccagttaaacccaaagaagctactccagctactgctggcaaatccatcagtcttgatattgagaccacgaagggtacagatcagtttgacttcactgatgataataatgttaagaccttcagtaggaagaacgactgtgtgtttgacaaggtttcagagaaaagtgatgtggtttgggaatccgagggtgtgtctggtactatggttaggactaagaaattccctaacggtgacatgttcttggtcatactactggaggatgatatggtcaggctgttccaaaaacctgctggtggaaaatggtctgatgttactgctgatagatttgatttgaagaaattgaagttctttggtgaaagtgataaggaactaaagtcgtcagattataatgtaaatttggcttttctatcatatgaattcgtattcaaaactggtatcaaatgtcagaaggtgaaattgggagatgacgtggtatggaaccatgatgaggatcagaagtttgaggagatcaaggcgtttacacttggtcttaccacaaataagttctttgtgaagaacaagaatgatgaagtcaagaagatagaatatgaggctaagactaaagaagaggttaaggggacagttaaagccgaagaacctaaaccagtagcagaacctgcaaagcctgtcgataaagaacctgctaaggaggtaactgagactatcaaacctgctacagctcaagtaacaactgctgtaacaactcaacctacaacaacttctgttgttaaagaggctcccaaaccagctgtgcctgaagaacctttatcagatcgtactgaaaagtccatcgaccttgacattgataagactcagggtactgataaaattgagtactcaaagagccagagtggtaacattcatagtttcactcccaagggagatcacttgttcattaaaattacccagggaaacgatgttctttgggagtcaagaagtaatttgtttggaaccaaggttatatttattagtgagggtaacaagaattacgtaggtatcatacttgataacggtggattggtactatttaacaagttcgctgggaagtgggacgatatcactaataccaaatatgatgtgatgaaactgaaattctatgacgataaagagaaggaactcacgtcctcgagttacgaggttgccctagttgactactcttacaggattatattcaacagaaatgttaagtgtaagaaggtgaagtatggaaacgacgatgtttggaaaagtactgatgataccaaatttaaagaaatcaaaatgtttgatcttgattttgtttctaacagttttgtggccgttaaggataaaaataaatctaagaaactagattttaaaccaactcccacaactacaactcctcctgctacgcaaacacccacaactactgctgctactacaacaactacaacttctcctgttacaactacaacacctccagctacaacgactgctacaacacctgtaacaactggtactaccaaaggggttacccttgacattgccacgactcagagtaccaatgattgcgactactgcaagagtggtagctatccaacatatacagcgaaatctgggtgtggattcaacaaaattgtgaagaaaacagaagtcatttgggaatccaaaaatgtgcttggaaccatagtggctactaagggtaatgataatgttgcaatatttctggatagcggtggttgtttagtactcaaaaagtctagtggtaagtggaatgatatatccagtcagaagcatgatatatccaaagtcaagttctttggtgataaggatgtagagataaagagagctaattacagggttaaagtcctagggtattcaagcagttttgccttcatttatgagcttaatcaaggagttaagtgtaagaaagtgaaacttggagagaaagaaatctggaaacaaagtgatcatccaggatttgaggttaccatgttccagtttgatcccattaagaacgagctttatgttgccaagaccaaagattcatacaagaaactaagcgtttaacccctaactccagttacaaaacaaagtgaaccagttgttaaaggtgtagaaacaatgagatggtagtagaaccagtcaatgaggtagtagaaccagtcaatgaggtagtagaacctgttatcaaagctgcagctcctttcactaaagtgtctgttcctgttgtgtctggtcaggtaacttctgtattccataagcatcttgaactgtgtaagtgtgattctgttgatcgtagtaagtctgttcctatggagtttgaggttcttgagtatcccaatagtgactcgttgttatatttgttaggtagtgagtgttctcaattgttgtttgatggtatatgtgtgtggaattatatgtctggtccatatcctacatctttatactttaaatcatctggttttctatatctgaactttgatccatactattatttatatgtgtatgatggtaaaagctgggtcctcaaaaaagatctttcccatcgtccttccgctaagttagatccttctatgtatcccaaagatattaccattattaccgaaaaaacagaagagtccttgaagcttgtcaataatgataccagtctatataatgtctatgatcatggcaatggaatgctcctatatgtattcactccaaatgctagatgtgttgaggtaaagtatcgtgatcaaaccgtttccaagagacaacctggtgcctatcccacaagaattctctttgatactgaatctttaacattcgagtacgatttccagaaaacttctgcaatctatagactttccgattccggctggtacctatccgacgcctttgataaactagaaaagatcgaaagtgaaataccttcctggatcgccaaacaatccaattacaaatttggatccagaatatccctatctaagctcaaaatatttacgtctgacaacagaaacggttccggtgccaaactgatacacctcaaaagttccatgttacattgtaacaagtggaattccggttatttctatccagtgaacggactatatctaaaactagtatacaacggtcatgtagtcttcaggtccacagagtatccatacagaggaagacctacagtagtcctgtttgaccttgataataataccgtaactgttttcttcagttccaacttcaaagtatccataaatcacatagatgatacagataaggaaacggttctggtgaccaagcgtgaaaccaaagaaccagatgctgttacagaaccgtcagaaagtgtatccgaacccattattagggctaaaaaggtaactgcagtatcagttgcaaccgcacctcccgcaaaactaaaaccagtctcacttgatattgagaaaacagaaagtacagaacagattgagtacgattatcaaaataactatcatacatacatacctaaagaaagtcatgcattttctaaggtatttcagggttcgaccattgtctgggaatgcaaaagtaatatatatgctactttagtcaagattaaacctataaacggtgtaatattagttgctatccaactcataagcaattcattcaaactatactcactctcaactggaaaatggtctgatcttactgataagaggtatgatgttactaaacttaagttttacggtgaaagagataaggaactcacttcatctgacttcaatgttaccataagtgattactctttctgttacttatttaacactggagtcaaatgtagtaaaattaagcatggagatcaagtcgtttatagttatgacgatcatgaagattttggtgatgtatcaatgttttctcttggtctcgtctcaaacgaattcttcgtcaagaacacttcaggcgatttcaagaaactagttacaaaggtcaccccagttactcttgatattaaccacgcacgcacaacccgtgaattcgaattcagttatcaaaataattatcaaacattcactcctaaatatggatatgttttaaacaaggttacccagggaaatagtccaatttgggagtcaaaagacaggaccgtttcattagtcaggactgtggctctcaaggaagaaaaatacacggcaatccttctcaatggtaacacaggtgaactaatggctgctgattttatattatttcacaagagtaatgctgaacagacatgggttaatatcactaatactagacatgatgtcgcaaaactcaagttctttggcgatggcaatgccccactcaagaaatctgattacgaagttacccttgttgactactcttacagattcatatttaaagatggaatcaagtgtataaaagtgaaatacggtaatgaagatgtttggagccataccgatgacaaggactattctaaaatcactagtttttcactaggccttatttcaaacaagttttatgtatttaaaagtgagtctgaattcaaaaaactaaattttaaatcaaatatagaagaatctgataaggcggatccgcaacctaaggttcaagaggctaaacctgaaactaaggaaccaactaaagctgagatacctcaatctaaagcagctcctgtaacaactgcgacagatcccacggaatctgctattacaactggaaaagctaaaccaaaggaagctcaagctacgactcctgtaacaacaactcaaccaagttctacataaactaaagctccagaaactactacaaaaactcatcccgagactaaggcagcgcctgctactgctacccctagttcccaaagtcaaacaggttctgaagcttcccaacctggatctaaaacacaatccgtttctagccctgaaaaactcaagtctcaaccacaaacaatatctgaatcacatcaacctaaatctcagacaacaggaccagaaacttctcagactagatcgtagcacaaacaggatccagtacaactcaacatatctcacagggtcggtcaacgccagcttcaagtacccaaccatctagtgcagtatctggatcacctcaacctaaatctcaaactacatctagtcctgtaaaacccaaaccataaattaaaactaaattatagactaaaccagagaatcccaagaaatctacatgaacaccttatttcatataatcttgctctgaatatttctatcatttcataaatcagttttaaaaaaatagaatgatagttctaatgatttataaatatgggtgtgtaataattttagtttgataatttgtgtgtcagggttctttcttaaacgttcaagatgattgagggaacagagagttataccacattctattaactcaaggttttccaattacatttttacgtgataaaacaatgagtatttggaatcttaatgttatttccaattttccgacttgaaagtaaacgtttacacattcgatagtttacaccgttcagattctgtttaagattagttaagacaaattgatttaataacaaattaccaaaaaatcaacttcattatccattgtgtaactgtaatttaatcaataatgtgattgggcaccacaattgacttaaaattgaaattatgaaaaattttgaaaatcatctttaaatactaaattttttgaaaaaataaaattaattaacttttccctgtaatttaataaaaattttcaagttttaaagaatatgaacttaccaaattaaatctaatgaaccctttttgaattttgttttgccttctaccaaattaattggttatgaactctactttttaatttttgttaaaattatttcaacgtataaaatccaatcattgttttttcttgttttacatctgaattttcgcattcagttgtcctttatactataacagtcaagattccataacccaattcggcgaaccgttttgactttgaattaaatcttgtcttttggtctcacggagtagtttgggatactcatgaactaagaatttaaggatttaaatataaaataactttctgtacaataaatttcaaagttttgtttatgtgtaacttttagttccaattaggaagattttgtattcactgtccgttaacttatgttaacttatgtgttaattttttgttttaaaatttaatttttctaaacttaattccctggatatttctgacttaaacctttatgattattattttctggctattggtatgactaaactcgattgctacaattctgtttgaaaattaatggatgagattgtgaacgataagctaattgttttctttaatgtaatataatttttgactgaataaaagtcatttgtaactgttgactaaagtcacttggttattactctggttattaatccatttttaaattaaaataatgcatctaatactcattctgatttggtaaaattacttgttaaaatgaaaatctctttttttgataactgtcattctatcaatttagtagaacaatgttgtttcaactgattgtaagtaaatttaactaatgtgttgtactatacttaatcgatgtagctaaatgtagttgatgaattagcgaaaattttgcgaaatgtttgggaaaggtatgtttcaaatctggtaaaatcactctaactataccttcacttaaaacacctagattcccataattttatataactatcctaaatgttaaatattttagatattgatacataactatctattcttcaagttactccgactatcactggcgttgagatatcaggaatatgaggattggtataagttctgcaggtgccttagcttcctttctgcttgactagtgcgattagacttattggtaagtgagtaatttggtttgatatttcagtttggatgcttccccattccactactatgtctaaccaaagaatgagatttttgttgcattggtaacatgaatgaaaaaatggattataaccgtaaatttattgttttatattacattggtcgctcaatggaaggctgtagaatcggcacagcctccatcaagtggcagtggaccacctaagggtggtggctccactccaaaccaatcctctacacctaaatcgcaacctacaactcaagctaatcaatcgcaatcacaatcaaatccaactaacgcaacaagtgctagtcctactccaggaactcagccatctcaagcaacaccaaatcaacccaatagtcagccagcaaaaaatgcatcgcaacatcaatcaagtgcatctgcaacaactgaaaaaaatcaatctgaaattaagtcggaggaaccaactggaacaactacacatgatgttcctgcaactaaattaactgtaactcttttgtctccgataggtagtcctagaccaaagaagactcctgaggtttttgctgccgaaggtcctagagaagccgttccggtaaacatcaatgggatggccactggaacaactgacttcagagaggattatctgagaaatgttaaagtatttactcctaaacccaaattcatattcaaccaaattgattttataaaaaccggaagtaagtgttgtggtgggaggtgttgtgcttctgagaaagttatttgggaggccaaggaccaaagtgagcattttgaaaaggtgcttgttgatggtctaggatccttttcgagtattagcaattttagtatctatttttgcaatgggtctattaagcattttaaaaagtcaggaggtaaatggaatgagtctcccagtctcgtcgaccttgatatcaagattaccaatagtaacatcacagttgacttctctaagaaggataactgtaggacattcacaaccaaacctggttattcaatcagaaaagttaagaagaaaggcaaacttatctggggatcacaaaatgaaaatgctctaaaggtggtactcattggtatcaagaaagagcccaagcatctttccgtacttttggaaagtggagaagttgtcttcctatttaaggaaggtaaggatgaaccttggaaagatataacctctagcaggaataagttaacagatctcaaaatgttttcacttgacgggaagaaacagatggaactcaacaaaggtcactactctgtaaccatcttcggtacatactatggttatctgttctatgaaggtgttggctgtgtgaaggttgtgcataaggacaagactatttgggacaagagggaggaaaaagagtttggtaatctgaagggagtattccttgatgttactttgaataagttcagtgtaatgaatgatgatgatagatactggttatgtgaagaggtaaagaagattaatcccgtgaggcttgacatcaatgagaaggccagtactgaagactacgattacactgtagatcatcacagaaatattaacatatttaccaccaaaggtaattcaatgtttaacaaggtcatcatccgtggtagtaccacctgttgctgttgtacttgttccgaatctgaagatcctatctgggaaactaatgatcctactaagtattctaccaaggttttcgctgacggtataggtgcctgtagcagtaccaaaaatgtgaccatatacttattgaacggtcagatagaacactatggtaagagtggtaggaaaaacccatggaagatgatctctcacaaattaacccttgacataggtaagacctcgagtaccattgggtatgactttcatcatgatggtgagaagaggactttcacggctaaacctggattcctattcagcacagtcattcttaaaacttcctggagatggctagtctgcggttcgagttgttgtaagtctgggtgtcttgaagatcatattttttgggatgcaccaacttatgaccagtgctcgaccaaggttgtagtctatggtgttgaatctaatattaagaatattaacatattccttaataataataagatcaaacacatacacaaggtgagcggttactgggtctcatcgacagacattgttcttgacattgagaataataaaaataatgaccttttcgactatagatccaccagaggatttggccacttcattcctaaagccaatttgacaatcgagaaaatcatcaaaacatacaaatctaattgctgtgattctgagtgttgtggcacaattaatgaactcgagatttggaaagcagatccaggggatcatggtcttagagcagtgttgatgggtgcgaaaaaggaggagaaacatctttccgtactactccagagtggtaattatgtacttcttaagaagtctagtaagggtcaaccatgggaagacgttactaatgataaacacaatttctccggggtaaagatgttttccctggaagagagtacctcaaagtaccatgaactgaccagggaagactatgatccaatagtttttgaatgtagatatggttatgagcttaaggatggtgtcaagtgtgtgatgattacgcatatggatatgttactttggacccatactgaagatcctgagtttgggtaccctaagggtctgtatctggatcttcgcagaaacatgttcattgtcacaagtcttaaagatcagacaaaggaaatagatatggataaacttactgttaaggctaaggtggctccacccaaacccactgaacccacacccgtgactcttgacattgagaaaactcagaccaccactgagtatgagtacaaggatgtgagtggagtcgtcacatatactcccaaggcaggtcgtgtgtttagtaaggtatccgaagaccagtatgaaatttgggtatcagtttcagatgtttatggtaccctggttaggaccaaggtcacaaaggatattaattacctggttatattactgaacaataggacattcaatttgttccaagagggagaaaatgagtggaatgatattaccaaagagagacacgatgttaagaagctaagattcctgggcgaaagtgacacagagatccagacatcccaatacgaagtatccattgtagacatgtcattttgtcacacattcaatactggtgtcaaatgtaagaaagtgaaactgggtgaagatgttgtttataactatgatgatcatacggattttggagatatatcggtattttcattgggtcttgcatcaaacaatttctttattaagaacgcctctggagatgtcaagaagatagaaaaggaggttgaggaagaggctgaagaacctacacctgaggccgctgagcctacaccaactgctcctgaagaacctacaactaaggctgctgaacctacacctgaggttgagaaagaggaagaagaggctgaggaacctgcacctgcaccagaaccaactgaacctgagcctaaggatgttgttaaggaacctgctaaacccgaaccaactcctattaccaaagctcctgatgctagatctgaaccattcgttactcctctatcggtcaccaaacctacacacgttacacttgatatagatgacactcagagtactagtgaatatacctatactgatcaaaatggagttgttacatacgttgttaagacaggatgtggattttctaaggttacccaaggatcaactgttatttggaatctcaaagatatttgtggtaaattggttaggattaagttatttggcaacaatgaaagatttttggccgttatactctatgacaatacattcaatcttttccggcagtcagaaggtaaggagtgggaggatgtcacctgtcataggtgtgatgtaacgaaactcaggttcttcggtcacaatgacacggaattgaagactgttgactttgcagtctcgttcgtagacttcttttatagttttaatttcagacctatatcaaggtgtcttaaagtcaagtatggagatagtgaagtttggaagtatacttttcttagtaatttttcagatataacgaccttttattatggtatcatttcagatcgtttctttctaaggaaccggtttggccaatttatgaaactgatgtatgatccttcaactcaacctaggcgaacacctgaacagactcctgaacaagacccaacagtgactcaaggatctgggactggtacctctgaaccagctgaatcagccactgagacttcgtagactaaagtggttgaacctgtagtagtcaatgaggtagtagaacctgttatcaaagctgcagctcctttcactaaagtgtctgttcctgttgtgtctggtcaggtaacttctgtgttccataagcatcttgaactgtgtaagtgtgattctgttgatcgtagtaagtctgttcctatggagtttgaggttcttgagtatcccaatagtgactgtttgttatatttgttaggtagtgagtgttctaagttgttgtttgatggtaagtgtgtgtggaattatgtgtctggtccatatcctacatctttatactttaaatcatctggttttctatatctgaactttgatccatactattatttatatgtgtatgatggtaaaagctgggtcctcaaaaaagatctttcccatcgtccttccgctaagttagatccttctatgtatcccaaagatattaccattattaccgaaaaaacagaagagtccttgaagcttgtcaataatgataccagtctatataatgtctatgatcatggcaatggaatgctcctatatgtattcactccaaatgctagatgtgttgaggtaaagtatcgtgatcaaaccgtttccaagagacaacctggtgcctatcccacaagaattctctttgatactgaatctttaacattcgagtacgatttccagaaaacttctgcaatctatagactttccgattccggctggtacctatccgacgcctttgataaactagaaaagatcgaaagtgaaataccttcctggatcgccaaacaatccaattacaaatttggatccagaatatccctatctaagctcaaaatatttacgtctgacaacagaaacggttccggtgccaaactgatacacctcaaaagttccatgttacattgtaacaagtggaattccggttatttctatccagtgaacggactatatctaaaactagtatacaacggtcatgtagtcttcaggtccacagagtatccatacagaggaagacctacagtagtcctgtttgaccttgataataataccgtaactgttttcttcagttccaacttcaaagtatccataaatcacatagatgatacagataaggaaacggttctggtgaccaagcgtgaaaccaaagaaccagatgctgttacagaaccgtcagaaagtgtatccgaacccattattagtggttacaggtttgtacagatggaatagtttctacctgttatatgattttaattagttcatcctactattttataaattattggtatataaagcatgtcttaacaagaataactaattgggtattgtccgattattagttaccggccatatgctaaattgctacacctcgataaaattgaccgatatattaaatatataattagtatataatatatttccattaaacaaataactattaaacaatgtataggtcaatagatatgatgtgtaatatctaacacaaaatcataattaatcggacgttaatatttgtttcacttaaataagtaaacagtctcatagtcaattatagttacacattacattggtttttatcaaatttctctatacattgagattccttccccatagattccttatgtgtttatcttataattaagcaaataattgtgtttaacatttgtgtctttattattctatgtaaattatttgatttattttcaattgtctggttttaatttaaattttcatttcttgattccacaatcacacactatgcaaacggtaatttacattacacattattaaaacagatatgtttacaatttctaattatgcgttttgatattcaatatttttatattaatcatctttcttatactttatataccatatattaaacaaaaacattatttgattatctaattgaatatttatatattttaataaattctatcttttttgaatttcatgaattattttacaatattaaattttctcataggtttatcaataattgctttattttaacaatcaaattataaagatactggaattacaaattcctaataattccaaacataagactcttaaaactattaaacactctatataaacttgatctatcaaaagagatgagtctactaaacttaattccattaccctatctgtcaaagaatacaatatccaaattacaagatccacattaattgttaatgaacaataatctaaaagtagtactattttattacatatcactgataatagttatacacaaattactattcaagatccaaacaatgatcaaaaatcaaaatttaaaatattttgattaattccatacccgatctcaacgtgataacacactttttaactttgtaaacactggtaatactatacctaatactattaccataatattactatactaacgctacagttatataccataaaataattttaaactgaatcttggttatttctcattttaatttatttgatattagatcagagatcataaatttctagatatttcttgataattccccattttataaacaaaaataacaaattttatttattaataataatgtgatataatagttatataaatttatataatcttgttatctgtgtattcaataaataatttttgttattcatctgaattccttagattttttatctagatcccccatgggaaatagatattttaattattagaatgaataaatacgttatatacacatattttcttgtactgagcataattggatttgttagatcttccgataagcaaggcgcatctggagctggtgatgatgacagtgatgatgaaaattatgatttaattgtaagagaattagaaacattaattgaagatgatagtcaaactgttgacaccagtggagatacttcatcttcagttcctattcaacctggtacatattctccccatccttgttatcaaccaccacctcaaacaacaattccaccggctcaaacaacaattccaccagctcaagatccaaatcctaaaccaccagttacagaagaagctccgaaatattatttaatatcacctgaaaagggtaaggacgggaaatataaactaattccaattactcatcttgaatatacaccacctaaacctaaacaaaagccaatttctccaactcgcctcagttccgataccacccaaattagtcagaaaaaagatgaagtaaaatctactcccggtaaagaattagatcaaactaaaccaggttcaagtgctagtagtgaaggtgacagtgatagtgaagaaaactttgatgtgatagtaagtggaatagagaaattacttgaagatgaagacgcccaaccaattactcagcctgaaaatgttgtttcacctggagccgaaacacctgctgcaggaaccgataaattaccttcaattgtgtttttaactgacgatccgaccggtaaactagttccaatgaatgatagcaaatataagatactaatctctgatcgtttttcaattaaatttaaatttggagctcgtcttattaagatactctgcgatggtataaccgtgtggacctatacaccagggttatcttatcctaggacagtaatttttagaaaagttcaaaacatattcgaagtcaattttaataacagagtttcatcttgtattcttcaaaatggaatatgggttgaaagggttgtttttgctcctcaggaattaaaactatatagaaaaagtagtagtggaaattattatagaatgacacataacaaatataatattcaacttacgccatctcagtcattccaatatgtttttaatacaccagttttgtgcgagatgatccaaattgaacacaaaatcgtttggataagaaaaccaaatgacccacctcttttaaaattgacctattttagcaaaagttatgtaagattatattttcgatattattcgatcgaaatttataattcaaatgactctgttgtaactaaaactttccctagaaattggtaagttaaattatgtatttcttagaattataattaaatatttaatttcatcgattttcaggcaatattaaattcatttttaataattttttagatttttaatttttaaactaataaaaatattttaaatgtcagtaatctcataatttaattaaacatagcccatttgatatttcaatttttaaccttaaaattttaaaaattattttatatttttacattatttacgagttgataaatacaacactattgtatatttcaaataatttttagatcccccatggttttagaatagataaattatataatgcaaagatataaaatattcacatatggactaataataatattaatgcgaatcgaatgtgtaaattgtggttataaaccagataacacacatggcaccaccagtaatgatagtgatgaagatgatgataattttgaagttactgagactgacgtaaaaactgaaggctctgataaacaaaatattgataccgaagcatatgaaagagtagtaagagagttggaagatttagtaattggagatagtgatcacacaggtgttgaacagcatgaacctactccaccaaaaccaagtcatagttacagaagtaacagacctactagacgtcctcgtaaagaatttcctcaagataaaccttatgaacaaggtaaagaatttcctaaagataaaccttatgaacaaggtaaacatgtaaaacctgaagctatttatgataaagcagtcatgactgttagtaaacctaaacgtattagaaaatgtgagtcgattaagttttttaagatagatcaaactggaaatatggttgaaatgggtttttatgattatacagtatactttaaggataaatctgcccttaaatattcattcgatgcaaatctggaaatgattaaatgtgatggtgatactgtttataaacataaaagtggactagattatgcattaacattaacatataataaatgtgcaggcagatttgtgattcgtttaaaaaatcattttctgtttattaggtatgcaggtcgtacgtgggtagaacatgatcgaataatcccagactatattaaaatattcacacaagattctgaaggtaattatgttgaactcacccctcaacagtgtaaaattgatataactgcgactggatcgttcaaatattatgttaaaggcttaaattgcaccagaattgaaatttatggagaagtaatctatcaaaaaaaagatcatgaggattatccagaatcagtaagctatagtcttaaaaaatgttttatgatttatttcaatggatttgttcgttcaattgaaagaagacatgggaaatttcgggaagtctataccagatcaagcccaaaatggaatgttcattaaacaagtaaatttttcatttaatacattatatcataaatacttttactacgattaaaattagaatttattatattttatgcttatttttcccaacaagcatttatttcctgtgcaaataacttatgcaccgatttcaattttttgatcgtcaatgtaatatgatgatccaatttataacaacactttattaaatatgtaacatttttagttaattttttggaatttaattttatatattctttcggtatgttttttacagtttagattaaaaattaatatagttacccattaaatatctcattattgttcattttcagatcccccatggttaataatagatttttaattcaatggatcgccgttacttgatcaaacatgtaataatactagtactaatcggattcgttagatgtgccgacaaatctaatgataaaacagatgataatggatatggtgctgaagattcatcgaaagaattgagactcgtgccatatagcgatagtgaaggcgaagacgataattctgaagaaacacaaacatctgaacaggctaaatcttctacaggcgttagagaagcggaaactcaaacagatcaggacacaccacaggactcaactcaatttacccaacctcaacagtactatgatccaactccacaacctggaccagtactgtattatgtaacattaaatcaaccaattcctcttcaaccaataactgaacaaccacagatattacagcattatggtccacaacctatagttgaacctattaattatggacctcaacctatatctcaacctaatgattatggaccacaacctattgattatggaccaaatcaacccatctattatgaatctccgcaaccacaaacaactcaagaacaaccaattcagtattatgaccagccgggaatggttcaacaaacaaattatgtaccaccacctcaggatatttctatgccaggttcatatcaacaagtttattatgggcaacaacctgctgagcctcaacagccaatacaacctcaatattatcaaccacctcaacctcaacaacagatacagcctcaatattatcaaccaactcaacctcaatattatcaaccacctcaatcacaacaacagatacagcctcaaacttatcaaccaccttatgatactgtaccaatacaacctcctcaacaaatgcaacctcaatattttcaaccaccttatgaaacttggccaatacaacaacctcctcaaccattacctacggctgggccacaacaacctattcagtattatgtaccacaacaagcacctgaattgttacagcctcaagtaccgccacaacagccaatgccgacttaccaaacacctccattaataccggaacaacaatttactcaatctggttaccctggtccacaacaaccaccttatccgagacatccattaccaatagaacaagcacaaccgattcaacctggttcacaacaaccaccttttccaagacatggaataccaatagaacaagcacaacctattcaacctggttcacaacaaccaacttttccaagacatggattaccacttggtcaaccaataccgcgtaatctaaggcctcagtttggattacgtggcccacaacaacgtccaggctatccaggtcctaaatttccaccctatccaagacccagattaccagttagacagagaatgccaccgtatgcaagaccacgattaccagttcaacgccacgttcctcctcttccaaggcctagattacccgttagacagccaatgccgccttttccaagacctcaatttggactacgtggcccacctccacagccacaaccacaaccacaaccacaaccaagtcatcattttccaggacctatggtcacaccaagagctcctatacaaatactaactcgaccaagtaatgaaaaaactgaatcatcagataaaccacccaagacaacagaaaaagcagttgacgaaacacctacacagccaactcaagatcaccagccacaatctgatacatctgagccagccgaaccaaaagttactgaagaattggaacctgaaactattccagttcaactagattcagatggtgatgacggcttaactgatcaattatcagggctccaactagctggtgataaacctacacagcccagtcaagataagggtccaagtaaaactccagaccaacctcaggatcaaccaactggtgacgctgctggatcaggagatggtcaaccaccatcagaccaacctgaacaacctagtgaatcaggcggtgctgaaggcggtgatgagcccgatcaacctaaacctgaagaagttgagggaaaaggtaaacgtaaaatatgtaaagaaatcaaattctataaaaaagatgaaaaaggtaacacagttccaatgactgaggatgaatataaaattgtaaaggataatgatcagaggaccgtatatgaattaacaaaaaatattgcagaattacactgtgacggtgagaaagtttatattcatagatcaaccaactactcttgtaaatcagtaaattttttcaaaaatcgttgtaatttctttttcgaaacttccgacgggttctatatatctaaccataccaaagctggttggaaagtatttcctcataattatagatcaatggttaaactttacactagagatggtgatggaaattatgtgttattgaaacgtgatgattatacaaccaccattactgatagaggttgctacaaattcatgcttgctcaaggtgtaaaatgttataggattatgatgaaaaacagtgtagtatgggaaggaaccgatggtgaagagactcctgaagttttttacgttaccgttaaaaatgaagttgtacttttacttggtggtaaatttcatgtttatgggaaaagagctgataagtatttatatgttaaaacttactcaactttttagtcgaagatttataaatttaaacctttaaactaaaattttaaaattaagacaaattttaattaaaaagactttataaaaatttttaaatgttttaacactcattacacattaattttttggttttaaaaatgattttatccattttatagtattatcaatatttatgcattaactagacaagttataaattgtccagtatactattaaatattaattattttaacaattttcaagcttttaatgattaaaattgattttaaagtaaataaatatgaaatttgttacaattaaatccagaattgtattaattttagctgaatttctaaaatcttaaaaataacaccaattgatgattgtggacatctagatactcatattaaacgaatataaacaactttaaacagtcaaataacactaaaaataactaaaaccctatcaacatcgactttagtccgtataacacatgtctaaactcatgtatactcttttatatatacattgtgtatattatacctgttatacatagtatacattaagcccataacatatatctgtatattgcttgtagaaaacatcatttaggcactttagaccttagcactacttgtttgtagggcctttcctcatacgagtttcagcgactgtgtcgacccagcccgaccaactttggagcctcgactgaccattttgggtatataaattttaggtcaattttagacattttccccgcaattaacatcataacccccattacaaattagagccaaacacactatttcatatgttaaacagatttttataaaaggtttgtttttcaactttaaaccttataacaatgttcatacttgtacttaagattaggattagcatattttagccagtctaattgttacacacacggagaaatcacacagtattttcaaaccgtgaatcaccaactaaatgccagaattcaattcttttctaacacaaatgtaaactaatcatatttctaattgcaaaaatgacttcatccagctattgtcactctaaaaagtatttatttgacctactaattctactcatatttgatattttccacatatttatcatattccaactaggattcctaaagtgtttgacagtaacattttaagcatttcagtgaacttcactcttctctctggttagttgtatggtcatttccccctagtgttcttccatgttcaagtaaattatagacaacttcaaaatgaattactaacgagttttaacgaggttttaatcatttttttaacaattttattaacaattttagttatgatccaatacttcaatgacacatttgttgacctctatcatgaacttccctggactttacggacttcttattgtcatctaggagtatttaggaattcaatattacactctattagctagttactgttcataattggtgttcattaccgttgagtgttcctggttgtgtgttagaagagttcgtagttttgtacttagtttttgattattttaactgacctttgtttagtatttcaagtctaattctttcatgtcagacaattttttctattgttctttaaagtgtttggattcattaagaagtgttttcaagcccataaaaagtgttatttagacacattttggtatgattgtagacttagttttaactttgaatttagtaagtctagttatatttgagtagtttggaggtcttaaattgagttttttgtcttcaatctgttagtttcgtatcaagacaataaatttcccaatgttttcagaattagcaccagggttgagtgttataaaagttagtattagataattatttagtagttatagttagattagagtgtttttagagtagatttcagagttacattttgaccctgaagttgagtgtttaatgtgttataagttgttcttagtagtttttagacaccaaagttgagtgaattagattattgttttactaggttagagtatttttaaagtatttttagagtgtgttttactaagtttttagagtagagttgattagttttcagtagattttagagagttagtggtttagattagagtagaatgagtattttggatattagattaccggtagttttagaccctagagttgagggtttttgaaagtcagttttatattctttttgactattttacggtagagttgagtgtttcaattgtcattattgttacattttgagcctagattagagtgtttttagagtgtttagacagtttaagtcgattagagcatttttactttagattttacatttagtatttaaagagtcagtttttttagaccctggaattgagttgttttagattaagttgggtgtttttaatgttattttactattcttttactcgagttggactgttctttactattatttcactatgttatagtactttggaggtctttaaatttagttttttgaactttaatctgtttgtttcgtatcaagacattaaatttccccactcttgtgtaattgatcctagacttcggtgttttcaaattgctattactttagtgttttgaccccacagttgattagtctttttgaccctcaagttaagtgtttggtattatccccacaagtattttagattctttaggacattaggttttaggttttagggttttagggttttagggttttagggtttagggtttaggttttagggtttagggtttagggttttagggttttagggttttagggttttagggttttagggttttagggtttagggttttagggttttagggtttagggttttagggttttagggttttagggtttagggtttagggttttagggtttagggttttagggtttagggttttagggtttagggtttagggtttagggttttagggttttagggttttagggttttagggtttagggtttagggtttagggtttagggtttagggttttagggtttagggttttagggtttaggttttaggttttagggtttagggttttagggtttagggtttagggtttaggtattagggttttag

(The sequence listing continues in the following parts.)
